(19) United States
(12) Patent Application Publication
(10) Pub. No.: US 2010/0088778 A1
(43) Pub. Date: Apr. 8, 2010

(54) Methods of Treatment, and Diagnosis of Epilepsy by Detecting Mutations in the SCN1A Gene

(76) Inventors: John Charles Mulley, South Australia (AU); Louise Harkin, South Australia (AU); Samuel Frank Berkovic, Victoria (AU); Ingrid Eileen Scheffer, Victoria (AU); Steven Petrou, Victoria (AU)

Correspondence Address: JENKINS, WILSON, TAYLOR & HUNT, P. A., Suite 1200 UNIVERSITY TOWER, 3100 TOWER BLVD.,, DURHAM, NC, 27707, US

(21) Appl. No.: 11/922,377

(22) PCT Filed: Jun. 16, 2006
(86) PCT No.: PCT/AU2006/000841

§ 371 Date: Aug. 13, 2009

(30) Foreign Application Priority Data
Jun. 16, 2005 (AU) 2005903146

(51) Int. Cl. C12Q 1/68; C12N 15/12; C12N 15/85; C12N 5/00; A01K 67/027; C07K 14/47; C12P 21/02; C07K 16/18; G01N 33/53; A61K 31/7105; A61K 39/395; A61P 25/08

(52) U.S. Cl. 800/16; 435/6; 536/23.1; 435/320.1; 435/325; 800/13; 800/18; 800/17; 800/14; 530/350; 435/69.1; 530/387.9; 530/387.3; 435/7.1; 514/44 A; 424/133.1; 424/139.1

(57) ABSTRACT

A method for the diagnosis of an epilepsy syndrome, including SMEI or an SMEI-related syndrome, in a patient comprising testing for an alteration in the SCN1A gene in a sample obtained from the patient; and if an alteration is identified, comparing said alteration to any one of those listed in Table 3, wherein if said alteration is identical to any one of those listed in Table 3, a diagnosis of an epilepsy syndrome, including SMEI or an SMEI-related syndrome, in said patient is made in accordance with the correlation set forth in Table 3.

### TECHNICAL FIELD

[0001] The present invention relates to the diagnosis and treatment of epilepsy, particularly severe myoclonic epilepsy of infancy (SMEI) and related syndromes.

### BACKGROUND ART

[0002] Epilepsies constitute a diverse collection of brain disorders that affect about 3% of the population at some time in their lives (Annegers, 1996). An epileptic seizure can be defined as an episodic change in behaviour caused by the disordered firing of populations of neurons in the central nervous system. This results in varying degrees of involuntary muscle contraction and often a loss of consciousness. Epilepsy syndromes have been classified into more than 40 distinct types based upon characteristic symptoms, types of seizure, cause, age of onset and EEG patterns (Commission on Classification and Terminology of the International League Against Epilepsy, 1989). However the single feature that is common to all syndromes is the persistent increase in neuronal excitability that is both occasionally and unpredictably expressed as a seizure.

[0003] A genetic contribution to the aetiology of epilepsy has been estimated to be present in approximately 40% of affected individuals (Gardiner, 2000). As epileptic seizures may be the end-point of a number of molecular aberrations that ultimately disturb neuronal synchrony, the genetic basis for epilepsy is likely to be heterogeneous. There are over 200 Mendelian diseases which include epilepsy as part of the phenotype. In these diseases, seizures are symptomatic of underlying neurological involvement such as disturbances in brain structure or function. In contrast, there are also a number of “pure” epilepsy syndromes in which epilepsy is the sole manifestation in the affected individuals. These are termed idiopathic and account for over 60% of all epilepsy cases.

[0004] Idiopathic epilepsies have been further divided into partial and generalized sub-types. Partial (focal or local) epileptic fits arise from localized cortical discharges, so that only certain groups of muscles are involved and consciousness may be retained (Sutton, 1990). However, in generalized epilepsy, EEG discharge shows no focus such that all subcortical regions of the brain are involved. Although the observation that generalized epilepsies are frequently inherited is understandable, the mechanism by which genetic defects, presumably expressed constitutively in the brain, give rise to partial seizures is less clear.

[0005] The idiopathic generalized epilepsies (IGE) are the most common group of inherited human epilepsy and do not have simple inheritance. Two broad groups of IGE are now known—the classical idiopathic generalized epilepsies (Commission on Classification and Terminology of the International League Against Epilepsy, 1989) and the newly recognized genetic syndrome of generalized epilepsy with febrile seizures plus (GEFS⁺) (Scheffer and Berkovic, 1997; Singh et al., 1999).

[0006] The classical IGEs are divided into a number of clinically recognizable but overlapping sub-syndromes including childhood absence epilepsy, juvenile absence epilepsy, juvenile myoclonic epilepsy etc (Commission on Classification and Terminology of the International League Against Epilepsy, 1989; Roger et al., 1992). The sub-syndromes are identified by age of onset and the pattern of seizure types (absence, myoclonus and tonic-clonic). Some patients, particularly those with tonic-clonic seizures alone do not fit a specifically recognized sub-syndrome. Arguments for regarding these as separate syndromes, yet recognizing that they are part of a neurobiological continuum, have been presented previously (Berkovic et al., 1987; 1994; Reutens and Berkovic, 1995).

[0007] GEFS⁺ was originally recognized through large multi-generation families and comprises a variety of sub-syndromes. Febrile seizures plus (FS⁺) is a sub-syndrome where children have febrile seizures occurring outside the age range of 3 months to 6 years, or have associated febrile tonic-clonic seizures. Many family members have a phenotype indistinguishable from the classical febrile convulsion syndrome and some have FS⁺ with additional absence, myoclonic, atonic, or complex partial seizures. The severe end of the GEFS⁺ spectrum includes myoclonic-astatic epilepsy.

[0008] In GEFS⁺ families, linkage analysis on rare multi-generation large families with clinical evidence of a major autosomal dominant gene have demonstrated loci on chromosomes 19q and 2q. Both the 19q and 2q GEFS⁺ loci have been confirmed in independently ascertained large families, and genetic defects have been identified. Families linked to 19q are known and a mutation in the gene for the β1 subunit of the neuronal sodium channel (SCN1B) has been identified (Wallace et al., 1998). This mutation results in the loss of a critical disulphide bridge of this regulatory subunit and causes a loss of function in vitro. Families linked to 2q are also known and mutations in the pore-forming α subunit of the neuronal sodium channel (SCN1A) have been identified (PCT/AU01/01648; Escayg et al., 2000).

[0009] Severe myoclonic epilepsy of infancy (SMEI) is classed as an epileptic syndrome that manifests as both generalised and focal (partial) seizures (Commission on Classification and Terminology of the International League Against Epilepsy, 1989). SMEI begins with prolonged febrile and afebrile hemiclonic and generalised seizures in the first year of life. Between one and four years, other seizure types evolve including myoclonic, absence and atonic seizures. Neurological development is normal in infancy with progressive slowing after two years. A family history of epilepsy and/or febrile seizures is often found in SMEI patients and recent work has shown that family members have epilepsy phenotypes consistent with the GEFS+ spectrum (Singh et al., 2001; Veggiotti, 2001). From a clinical perspective, as GEFS+ and SMEI involve fever-related seizures, it was thought that sodium channel genes may be the target for mutations in SMEI affected individuals. This fact was later confirmed when mutations in the SCN1A gene in SMEI patients were identified (Claes et al., 2001; Ohmori et al., 2002). Of interest is that each of these mutations were de novo, a fact difficult to reconcile based on the clinical experience that a significant number of SMEI cases have a family history of GEFS+.

[0010] Recently, mutations in the SCN1A gene have been identified in the SMEI-related syndromes SMEB (borderline SMEI) and ICEGTG (intractable childhood epilepsy with generalised tonic-clonic seizures). Patients with SMEB are a subgroup with clinical features similar to those of core SMEI but are not necessarily consistent with the accepted diagnostic criteria for core SMEI (Commission on Classification and Terminology of the International League Against Epilepsy, 1989). Studies have shown that the rate of SCN1A mutations in SMEB is slightly lower than SMEI (Mulley et al., 2005); however, like SMEI, SMEB-related SCN1A mutations appear to be de novo.

[0011] ICEGTG has been clinically delineated from SMEI primarily based on the absence of any other seizure type. ICEGTG is regarded as a subset of SMEB; however, this clinical distinction is not definitive (Mulley et al., 2005).

[0012] The development of a molecular diagnostic test to aid in the early diagnosis of SMEI and SMEI-related syndromes is important. Such a test would direct the correct treatment strategy for patients likely to be affected with SMEI and related syndromes and would predict a risk for seizure aggravation as a result of factors such as fever induced by vaccination or other causes. Clinical studies to determine the molecular basis of SMEI and related syndromes have been variable in their results and have been inconclusive as to a single molecular basis for SMEI and related syndromes, particularly as alterations in the SCN1A gene are involved in other epilepsy subtypes such as infantile spasms and GEFS+. The inventors have recognised the need for such a predictive diagnostic test for SMEI and related syndromes and have therefore established a method that overcomes the limitations identified in previous clinical studies and determines the likelihood that an epilepsy patient has SMEI or a related syndrome based on a molecular analysis of the SCN1A gene.

### DISCLOSURE OF THE INVENTION

[0013] In a first aspect of the present invention there is provided a method for the diagnosis of SMEI or a related syndrome in a patient comprising detecting an alteration in the SCN1A gene and ascertaining whether the alteration is known to be associated with SMEI or a related syndrome or not associated with SMEI or a related syndrome or, if not known to be either, determining the likelihood that it is an alteration associated with SMEI or a related syndrome.

[0014] In a further aspect of the present invention there is provided a method for the diagnosis of an epilepsy sub-syndrome selected from the group consisting of SMEI, SMEB, cryptogenic partial epilepsy (CP), symptomatic generalised epilepsy (SG), symptomatic partial epilepsy (SP) and postencephalitis with unknown aetiology (PE), in a patient comprising:

[0015] (1) detecting an alteration in the SCN1A gene in a sample obtained from the patient; and

[0016] (2) comparing said alteration to any one of those listed in Table 3,

[0017] wherein if said alteration is identical to any one of those listed in Table 3, a diagnosis of the epilepsy sub-syndrome is made in accordance with the correlation set forth in Table 3.

[0018] In a still further aspect the present invention provides a method for the diagnosis of an epilepsy syndrome, including SMEI or an SMEI-related syndrome, in a patient comprising:

[0019] (1) testing for an alteration in the SCN1A gene in a sample obtained from the patient; and

[0020] (2) if an alteration is identified, comparing said alteration to any one of those listed in Table 3,

[0021] wherein if said alteration is identical to any one of those listed in Table 3, a diagnosis of an epilepsy syndrome, including SMEI or an SMEI-related syndrome, in said patient is made in accordance with the correlation set forth in Table 3.

[0022] This information is important for initiating the correct treatment regimen for a patient. Current antiepileptic drug (AED) treatments may aggravate seizures in some patients with epilepsy. This may take the form of increased seizure frequency, increased seizure severity, or the appearance of a new seizure type. With respect to SMEI, it is known that carbamazepine, gabapentin, lamotrigine and vigabatrin may aggravate seizures (Bourgeois, 2003) whereas valproate has shown to be of benefit to SMEI patients (Scheffer and Berkovic, 2003). The diagnostic method of the present invention therefore will provide important information towards directing the appropriate primary AED selection in patients suspected of having SMEI.

[0023] An alteration in the SCN1A gene may encompass all forms of gene mutations including deletions, insertions, rearrangements and point mutations in the coding and non-coding regions such as the promoter, introns or untranslated regions. Deletions may be of the entire gene or only a portion of the gene whereas point mutations may result in stop codons, frameshifts or amino acid substitutions. Point mutations occurring in the regulatory regions of SCN1A, such as in the promoter, may lead to loss or a decrease of expression of the mRNA or may abolish proper mRNA processing leading to a decrease in mRNA stability or translation efficiency.

[0024] The identification of SCN1A alterations in a patient that lead to more severe changes to the SCN1A protein (such as frameshift mutations and nonsense mutations leading to a truncated protein) increases the likelihood that the patient has SMEI or a related syndrome. This likelihood is increased even further if it can be shown that the alteration is a de novo change rather than one that is inherited from the patients parents or relatives, or that the alteration in the SCN1A gene is one that has previously been associated with SMEI or a related syndrome.

[0025] In the description and claims which follow, the words “SMEI or a related syndrome” or “SMEI or SMEI-related syndrome” are intended to be used interchangeably. An SMEI-related syndrome includes Borderline SMEI (SMEB) and intractable childhood epilepsy with generalised tonic-clonic seizures (ICEGTG).

[0026] In an embodiment there is provided a method for the diagnosis of SMEI or a related syndrome in a patient comprising performing one or more assays to test for the existence of an SCN1A alteration and to identify the nature of the alteration.

[0027] In a further embodiment there is provided a method for the diagnosis of SMEI or a related syndrome in a patient comprising the steps of:
[0028] (1) performing one or more assays to test for the existence of an alteration in the SCN1A gene of the patient; and, if the results indicate the existence of an alteration in the SCN1A gene,
[0029] (2) performing one or more assays to identify the nature of the SCN1A alteration.

[0030] There exists a number of assay systems that can be used to test for the existence of an SCN1A alteration and the invention is not limited by the examples that are provided below.

[0031] In one embodiment an assay system employed may be the analysis of SCN1A DNA from a patient sample in comparison to wild-type SCN1A DNA. Genomic DNA may be used for the diagnostic analysis and may be obtained from a number of sources including, but not limited to, body cells, such as those present in the blood or cheek, tissue biopsy, surgical specimen, or autopsy material. The DNA may be isolated and used directly for the diagnostic assays or may be amplified by the polymerase chain reaction (PCR) prior to analysis. Similarly, RNA or cDNA may also be used, with or without PCR amplification. In addition, prenatal diagnosis can be accomplished by testing fetal cells, placental cells or amniotic fluid.

[0032] In a specific embodiment, a DNA hybridisation assay may be employed. These may consist of probe-based assays specific for the SCN1A gene. One such assay may look at a series of Southern blots of DNA that has been digested with one or more restriction enzymes. Each blot may contain a series of normal individuals and a series of patient samples. Samples displaying hybridisation fragments that differ in length from normal DNA when probed with sequences near or including the SCN1A gene (SCN1A gene probe) indicate a possible SCN1A alteration.

[0033] If restriction enzymes that produce very large restriction fragments are used then pulsed field gel electrophoresis (PFGE) may be employed.

[0034] SCN1A exon specific hybridisation assays may also be employed. This type of probe-based assay will utilize at least one probe which specifically and selectively hybridises to an exon of the SCN1A gene in its wild-type form. Thus, the lack of formation of a duplex nucleic acid hybrid containing the nucleic acid probe is indicative of the presence of an alteration in the SCN1A gene. Because of the high specificity of probe-based tests, any negative result is highly indicative of the presence of an SCN1A alteration however further investigational assays should be employed to identify the nature of the alteration to determine the likelihood it is an alteration associated with SMEI or a related syndrome.

[0035] The SCN1A exon specific assay approach could also be adapted to identify previously determined SCN1A alterations responsible for SMEI or related syndromes. In this aspect, a probe which specifically and selectively hybridises with the SCN1A gene in its altered form is used (allele specific probe). In this case the formation of a duplex nucleic acid hybrid containing the nucleic acid probe is indicative of the presence of the alteration in the SCN1A gene. In each variation of the exon specific assay approach, it is important to take into account known polymorphisms in the SCN1A gene that are not associated with SMEI or a related syndrome. A secondary assay such as DNA sequencing should subsequently be employed to ensure that any suspected alterations are not known polymorphisms.

[0036] The SCN1A exon specific probes used for each of the abovementioned assays may be derived from: (1) PCR amplification of each exon of the SCN1A gene using intron specific primers flanking each exon; (2) cDNA probes specific for each exon; or (3) a series of oligonucleotides that collectively represent an SCN1A exon.

[0037] In a further embodiment, an assay to analyse heteroduplex formation may be employed. By mixing denatured wild-type SCN1A DNA with a DNA sample from a patient, any sequence variations in the SCN1A sequence between the two samples will lead to the formation of a mixed population of heteroduplexes and homoduplexes during reannealing of the DNA. Analysis of this mixed population can be achieved through the use of such techniques as high performance liquid chromatography (HPLC), which are performed under partially denaturing temperatures. In this manner, heteroduplexes will elute from the HPLC column earlier than the homoduplexes because of their reduced melting temperature.

[0038] In a further embodiment, patient samples may be subject to electrophoretic-based assays. For example electrophoretic assays that determine SCN1A fragment length differences may be employed. Fragments of each patient's genomic DNA are amplified with SCN1A gene intron specific primers. The amplified regions of the SCN1A gene therefore include the exon of interest, the splice site junction at the exon/intron boundaries, and a short portion of intron at either end of the amplification product. The amplification products may be run on an electrophoresis size-separation gel and the lengths of the amplified fragments are compared to known and expected standard lengths from the wild-type gene to determine if an insertion or deletion mutation is found in the patient sample. This procedure can advantageously be used in a “multiplexed” format, in which primers for a plurality of exons (generally from 2 to 8) are co-amplified, and evaluated simultaneously on a single electrophoretic gel. This is made possible by careful selection of the primers for each exon. The amplified fragments spanning each exon are designed to be of different sizes and therefore distinguishable on an electrophoresis/size separation gel. The use of this technique has the advantage of detecting both normal and mutant alleles in heterozygous individuals. Furthermore, through the use of multiplexing it can be very cost effective.

[0039] In a further approach, diagnostic electrophoretic assays for the detection of previously identified SCN1A alterations responsible for SMEI may utilise PCR primers which bind specifically to altered exons of the SCN1A gene. In this case, product will only be observed in the electrophoresis gel if hybridization of the primer occurred. Thus, the appearance of amplification product is an indicator of the presence of the alteration, while the length of the amplification product may indicate the presence of additional alterations.

[0040] Additional electrophoretic assays may be employed. These may include the single-stranded conformational polymorphism (SSCP) procedure (Orita et al., 1989). As mentioned above, fragments of each patient's genomic DNA are PCR amplified with SCN1A gene intron specific primers such that individual exons of the SCN1A gene are amplified and may be analysed individually. Exon-specific PCR products are then subjected to electrophoresis on non-denaturing polyacrylamide gels such that DNA fragments migrate through the gel based on their conformation as dictated by their sequence composition. SCN1A exon-specific fragments that vary in sequence from wild-type SCN1A sequence will have a different secondary structure conformation and therefore migrate differently through the gel. Aberrantly migrating PCR products in patient samples are indicative of an alteration in the SCN1A exon and should be analysed further in secondary assays such as DNA sequencing to identify the nature of the alteration.

[0041] Additional electrophoretic assays that may be employed include RNase protection assays (Finkelstein et al., 1990; Kinszler et al., 1991) and denaturing gradient gel electrophoresis (DGGE)(Wartell et al., 1990; Sheffield et al., 1989). RNase protection involves cleavage of a mutant polynucleotide into two or more smaller fragments whereas DGGE detects differences in migration rates of mutant sequences compared to wild-type sequences, using a denaturing gradient gel.

[0042] In the RNase protection assay a labelled riboprobe which is complementary to the human wild-type SCN1A gene coding sequence is hybridised with either mRNA or DNA isolated from the patient and subsequently digested with the enzyme RNase A which is able to detect some mismatches in a duplex RNA structure. If a mismatch is detected by RNase A, it cleaves at the site of the mismatch. Thus, when the annealed RNA preparation is separated on an electrophoretic gel matrix, if a mismatch has been detected and cleaved by RNase A, an RNA product will be seen which is smaller than the full length duplex RNA for the riboprobe and the mRNA or DNA. The riboprobe need not be the full length of the SCN1A mRNA or gene but can be a segment of either. If the riboprobe comprises only a segment of the SCN1A mRNA or gene, it will be desirable to use a number of these probes to screen the whole mRNA sequence for mismatches.

[0043] In a further embodiment, enzymatic based assays (Taylor and Deeble, 1999) may be used in diagnostic applications. Such assays include the use of S1 nuclease, ribonuclease, T4 endonuclease VII, MutS (Modrich, 1991), Cleavase and MutY. In the MutS assay, the protein binds only to sequences that contain a nucleotide mismatch in a heteroduplex between mutant and wild-type sequences.

[0044] When an assay is to be based upon the SCN1A protein, a variety of approaches are possible. For example, diagnosis can be achieved by monitoring differences in the electrophoretic mobility of normal SCN1A protein and SCN1A protein isolated from a patient sample. Such an approach will be particularly useful in identifying alterations in which charge substitutions are present, or in which insertions, deletions or substitutions have resulted in a significant change in the electrophoretic migration of, the resultant protein. Alternatively, diagnosis may be based upon differences in the proteolytic cleavage patterns of normal and altered proteins, differences in molar ratios of the various amino acid residues, or by functional assays demonstrating altered function of the gene products.

[0045] Further assays that are based on the SCN1A protein include immunoassays. Immunoassays for the SCN1A gene product are not currently known. However, immunoassay is included in the selection of assays because the procedures for raising antibodies against specific gene products are well described in the literature, for example in U.S. Pat. Nos. 4,172,124 and 4,474,893 which are incorporated herein by reference. Antibodies are normally raised which bind to portions of the gene product away from common mutation sites such that the same antibody binds to both mutant and normal protein. Preferred antibodies for use in this invention are monoclonal antibodies because of their improved predictability and specificity. It will be appreciated, however, that essentially any antibody which possesses the desired high level of specificity can be used, and that optimization to achieve high sensitivity is not required.

[0046] For the diagnostic detection of novel alterations in SCN1A involved in SMEI or a related syndrome, antibodies raised to the carboxy-terminal end of the protein would be preferable. For the diagnostic detection of SCN1A alterations previously identified to be involved in SMEI or related syndromes, antibody raised against the defective gene product is preferable. Antibodies are added to a portion of the patient sample under conditions where an immunological reaction can occur, and the sample is then evaluated to see if such a reaction has occurred. The specific method for carrying out this evaluation is not critical and may include enzyme-linked immunosorbant assays (ELISA), described in U.S. Pat. No. 4,016,043, which is incorporated herein by reference; fluorescent enzyme immunoassay (FEIA or ELFA), which is similar to ELISA, except that a fluoregenic enzyme substrate such as 4-methylumbelliferyl-beta-galactoside is used instead of a chromogenic substrate, and radioimmunoassay (RIA).

[0047] The most definitive diagnostic assay that may be employed is DNA sequencing, and ultimately may be the only assay that is needed to be performed. Comparison of the SCN1A DNA wild-type sequence with the SCN1A sequence of a test patient provides both high specificity and high sensitivity. The general methodology employed involves amplifying (for example with PCR) the DNA fragments of interest from patient DNA; combining the amplified DNA with a sequencing primer which may be the same as or different from the amplification primers; extending the sequencing primer in the presence of normal nucleotide (A, C, G, and T) and a chain-terminating nucleotide, such as a dideoxynucleotide, which prevents further extension of the primer once incorporated; and analyzing the product for the length of the extended fragments obtained. While such methods, which are based on the original dideoxysequencing method disclosed by Sanger et al., 1977 are useful in the present invention, the final assay is not limited to such methods. For example, other methods for determining the sequence of the gene of interest, or a portion thereof, may also be employed. Alternative methods include those described by Maxam and Gilbert (1977) and variations of the dideoxy method and methods which do not rely on chain-terminating nucleotides at all such as that disclosed in U.S. Pat. No. 4,971,903, which is incorporated herein by reference. Any sequence differences (other than benign polymorphisms) in SCN1A exons of a test patient when compared to that of the wild-type SCN1A sequence indicate an alternation potentially causing SMEI or a related syndrome.

[0048] In a further aspect of the invention there is provided a method for the diagnosis of SMEI or a related syndrome in a patient comprising the steps of selecting a system of assays comprising one or more assays to provide a test for the existence of an SCN1A alteration, and one or more assays to provide a test to identify the nature of the alteration, so as to determine the likelihood that it is an alteration associated with SMEI or a related syndrome.

[0049] In a further aspect, where analysis for an SCN1A alteration is inconclusive, an analysis of SCN2A is undertaken in the same manner as the SCN1A analysis.

[0050] In a further aspect of the present invention there is provided an isolated nucleic acid molecule encoding an altered SCN1A subunit of a mammalian voltage-gated sodium channel, wherein the alteration is one of the alterations in Table 3.

[0051] In a still further aspect of the present invention there is provided an isolated polypeptide, said polypeptide being an altered SCN1A subunit of a mammalian voltage-gated sodium channel, wherein the polypeptide has one of the amino acid alterations set forth Table 3.

[0052] Application of the invention has lead to the identification of a number of mutations in the SCN1A gene in individuals that have been clinically diagnosed with SMEI or related syndromes. This demonstrates the utility of the diagnostic assay in providing a likelihood that an individual may be affected with SMEI or a related syndrome.

[0053] According to a further aspect of the present invention there is provided an isolated nucleic acid molecule encoding an altered SCN1A subunit of a mammalian voltage-gated sodium channel, wherein the alteration gives rise to an SMEI or an SMEI-related syndrome, and wherein said nucleic acid molecule comprises an alteration identified as such in Table 3.

[0054] According to a further aspect of the present invention there is provided an isolated nucleic acid molecule encoding an altered SCN1A subunit of a mammalian voltage-gated sodium channel, wherein the alteration gives rise to an SMEI or an SMEI-related syndrome, and wherein said nucleic acid molecule has the sequence set forth in one of SEQ ID NOs: 1 to 33.

[0055] In a further aspect of the present invention there is provided an isolated polypeptide, said polypeptide being an altered SCN1A subunit of a mammalian voltage-gated sodium channel, wherein the alteration gives rise to a phenotype of SMEI or an SMEI-related syndrome, and wherein said polypeptide comprises an alternation identified as such in Table 3.

[0056] According to a further aspect of the present invention there is provided an isolated polypeptide, said polypeptide being an altered SCN1A subunit of a mammalian voltage-gated sodium channel, wherein the alteration gives rise to a phenotype of SMEI or an SMEI-related syndrome, and wherein said polypeptide has the amino acid sequence set forth in one of SEQ ID NOs: 42 to 67.

[0057] Additional alterations in the SCN1A gene were identified during this study. These alterations were identified in individuals that were not suspected of being affected with SMEI or a related syndrome based on a clinical diagnosis.

[0058] Accordingly, in a further aspect of the present invention there is provided an isolated nucleic acid molecule encoding an altered SCN1A subunit of a mammalian voltage-gated sodium channel, wherein the alteration gives rise to an epilepsy phenotype which is not SMEI or an SMEI-related syndrome, and wherein said nucleic acid molecule comprises an alteration identified as such in Table 3.

[0059] According to a further aspect of the present invention there is provided an isolated nucleic acid molecule encoding an altered SCN1A subunit of a mammalian voltage-gated sodium channel, wherein the alteration gives rise to an epilepsy phenotype which is not SMEI or an SMEI-related syndrome, and wherein said nucleic acid molecule has the sequence set forth in one of SEQ ID NOs: 34 to 41.

[0060] In another aspect of the present invention there is provided an isolated nucleic acid molecule comprising the nucleotide sequence set forth in any one of SEQ ID NOs: 1 to 41.

[0061] In another aspect of the present invention there is provided an isolated nucleic acid molecule consisting the nucleotide sequence set forth in any one of SEQ ID NOs: 1 to 41.

[0062] In a still further aspect of the present invention there is provided an isolated polypeptide, said polypeptide being an altered SCN1A subunit of a mammalian voltage-gated sodium channel, wherein the alteration gives rise to an epilepsy phenotype which is not SMEI or an SMEI-related syndrome, and wherein said polypeptide comprises an alteration identified as such in Table 3.

[0063] According to a further aspect of the present invention there is provided an isolated polypeptide, said polypeptide being an altered SCN1A subunit of a mammalian voltage-gated sodium channel, wherein the alteration gives rise to an epilepsy phenotype which is not SMEI or an SMEI-related syndrome, and wherein said polypeptide has the amino acid sequence set forth in one of SEQ ID NOs: 68 to 74.

[0064] In another aspect of the present invention there is provided an isolated polypeptide comprising the amino acid sequence set forth in any one of SEQ ID NOs: 42 to 74.

[0065] In another aspect of the present invention there is provided an isolated polypeptide consisting the amino acid sequence set forth in any one of SEQ ID NOs: 42 to 74.

[0066] The nucleotide sequences of the present invention can be engineered using methods accepted in the art for a variety of purposes. These include, but are not limited to, modification of the cloning, processing, and/or expression of the gene product. PCR reassembly of gene fragments and the use of synthetic oligonucleotides allow the engineering of the nucleotide sequences of the present invention. For example, oligonucleotide-mediated site-directed mutagenesis can introduce further mutations that create new restriction sites, alter expression patterns and produce splice variants etc.

[0067] As a result of the degeneracy of the genetic code, a number of polynucleotide sequences, some that may have minimal similarity to the polynucleotide sequences of any known and naturally occurring gene, may be produced. Thus, the invention includes each and every possible variation of a polynucleotide sequence that could be made by selecting combinations based on possible codon choices. These combinations are made in accordance with the standard triplet genetic code as applied to the polynucleotide sequences of the present invention, and all such variations are to be considered as being specifically disclosed.

[0068] The nucleic acid molecules of this invention are typically DNA molecules, and include cDNA, genomic DNA, synthetic forms, and mixed polymers, both sense and antisense strands, and may be chemically or biochemically modified, or may contain non-natural or derivatised nucleotide bases as will be appreciated by those skilled in the art. Such modifications include labels, methylation, intercalators, alkylators and modified linkages. In some instances it may be advantageous to produce nucleotide sequences possessing a substantially different codon usage than that of the polynucleotide sequences of the present invention. For example, codons may be selected to increase the rate of expression of the peptide in a particular prokaryotic or eukaryotic host corresponding with the frequency that particular codons are utilized by the host. Other reasons to alter the nucleotide sequence without altering the encoded amino acid sequences include the production of RNA transcripts having more desirable properties, such as a greater half-life, than transcripts produced from the naturally occurring mutated sequence.

[0069] The invention also encompasses production of nucleic acid sequences of the present invention entirely by synthetic chemistry. Synthetic sequences may be inserted into expression vectors and cell systems that contain the necessary elements for transcriptional and translational control of the inserted coding sequence in a suitable host. These elements may include regulatory sequences, promoters, 5′ and 3′ untranslated regions and specific initiation signals (such as an ATG initiation codon and Kozak consensus sequence) which allow more efficient translation of sequences encoding the polypeptides of the present invention. In cases where the complete coding sequence, including the initiation codon and upstream regulatory sequences, are inserted into the appropriate expression vector, additional control signals may not be needed. However, in cases where only coding sequence, or a fragment thereof, is inserted, exogenous translational control signals as described above should be provided by the vector. Such signals may be of various origins, both natural and synthetic. The efficiency of expression may be enhanced by the inclusion of enhancers appropriate for the particular host cell system used (Scharf et al., 1994).

[0070] The invention also includes nucleic acid molecules that are the complements of the sequences described herein.

[0071] The present invention allows for the preparation of purified polypeptide or protein from the polynucleotides of the present invention, or variants thereof. In order to do this, host cells may be transformed with a novel nucleic acid molecule as described above. Typically said host cells are transfected with an expression vector comprising a DNA molecule according to the invention. A variety of expression vector/host systems may be utilized to contain and express sequences encoding polypeptides of the invention. These include, but are not limited to, microorganisms such as bacteria transformed with plasmid or cosmid DNA expression vectors; yeast transformed with yeast expression vectors; insect cell systems infected with viral expression vectors (e.g., baculovirus); or mouse or other animal or human tissue cell systems. Mammalian cells can also be used to express a protein using a vaccinia virus expression system. The invention is not limited by the host cell or vector employed.

[0072] The polynucleotide sequences, or variants thereof, of the present invention can be stably expressed in cell lines to allow long term production of recombinant proteins in mammalian systems. Sequences encoding the polypeptides of the present invention can be transformed into cell lines using expression vectors which may contain viral origins of replication and/or endogenous expression elements and a selectable marker gene on the same or on a separate vector. The selectable marker confers resistance to a selective agent, and its presence allows growth and recovery of cells which successfully express the introduced sequences. Resistant clones of stably transformed cells may be propagated using tissue culture techniques appropriate to the cell type.

[0073] The protein produced by a transformed cell may be secreted or retained intracellularly depending on the sequence and/or the vector used. As will be understood by those of skill in the art, expression vectors containing polynucleotides which encode a protein may be designed to contain signal sequences which direct secretion of the protein through a prokaryotic or eukaryotic cell membrane.

[0074] In addition, a host cell strain may be chosen for its ability to modulate expression of the inserted sequences or to process the expressed protein in the desired fashion. Such modifications of the polypeptide include, but are not limited to, acetylation, glycosylation, phosphorylation, and acylation. Post-translational cleavage of a “prepro” form of the protein may also be used to specify protein targeting, folding, and/or activity. Different host cells having specific cellular machinery and characteristic mechanisms for post-translational activities (e.g., CHO or HeLa cells), are available from the American Type Culture Collection (ATCC) and may be chosen to ensure the correct modification and processing of the foreign protein.

[0075] When large quantities of the protein product of the gene are needed, such as for antibody production, vectors which direct high levels of expression of this protein may be used, such as those containing the T5 or T7 inducible bacteriophage promoter. The present invention also includes the use of the expression systems described above in generating and isolating fusion proteins which contain important functional domains of the protein. These fusion proteins are used for binding, structural and functional studies as well as for the generation of appropriate antibodies.

[0076] In order to express and purify the protein as a fusion protein, the appropriate cDNA sequence is inserted into a vector which contains a nucleotide sequence encoding another peptide (for example, glutathionine succinyl transferase). The fusion protein is expressed and recovered from prokaryotic or eukaryotic cells. The fusion protein can then be purified by affinity chromatography based upon the fusion vector sequence. The desired protein is then obtained by enzymatic cleavage of the fusion protein.

[0077] Fragments of the polypeptides of the present invention may also be produced by direct peptide synthesis using solid-phase techniques. Automated synthesis may be achieved by using the ABI 431A Peptide Synthesizer (Perkin-Elmer). Various fragments of this protein may be synthesized separately and then combined to produce the full-length molecule.

[0078] According to still another aspect of the invention, there is provided a mammalian voltage-gated sodium channel that incorporates an altered SCN1A protein as described above.

[0079] According to still another aspect of the present invention there is provided an expression vector comprising a nucleic acid molecule as described above.

[0080] According to still another aspect of the present invention there is provided a cell comprising a nucleic acid molecule as described above.

[0081] According to still another aspect of the present invention there is provided a method of preparing a polypeptide, said polypeptide being an altered SCN1A protein of a mammalian voltage-gated sodium channel, comprising the steps of:
[0082] (1) culturing a cell as described above under conditions effective for polypeptide production; and
[0083] (2) harvesting the polypeptide.

[0084] The mutant SCN1A protein may be allowed to assemble with other subunits of the sodium channel that are co-expressed by the cell (such as the SCN1B protein), whereby the assembled altered sodium channel is harvested.

[0085] According to still another aspect of the invention there is provided a polypeptide which is the product of the process described above.

[0086] Substantially purified protein or fragments thereof can then be used in further biochemical analyses to establish secondary and tertiary structure. Such methodology is known in the art and includes, but is not restricted to, X-ray crystallography of crystals of the proteins or of the assembled ion channel incorporating the proteins or by nuclear magnetic resonance (NMR). Determination of structure allows for the rational design of pharmaceuticals to interact with the altered sodium channel as a whole or through interaction with the altered SCN1A protein of the channel (see drug screening below), alter the overall sodium channel protein charge configuration or charge interaction with other proteins, or to alter its function in the cell.

[0087] It will be appreciated that having identified novel alterations in the SCN1A gene responsible for epilepsy, including SMEI and related syndromes, the altered SCN1A proteins will enable therapeutic methods for the treatment of epilepsy, including SMEI and related syndromes.

### Therapeutic Applications

[0088] According to still another aspect of the invention there is provided a method of treating epilepsy, including SMEI or an SMEI-related syndrome in a subject, comprising administering a selective antagonist, agonist or modulator of an SCN1A polypeptide as described above to said subject.

[0089] In still another aspect of the invention there is provided the use of a selective antagonist, agonist or modulator of an SCN1A polypeptide as described above in the manufacture of a medicament for the treatment of epilepsy, including SMEI or an SMEI-related syndrome.

[0090] In one aspect, a suitable antagonist, agonist or modulator will restore wild-type function to sodium channels containing SCN1A alterations that form part of this invention, or will negate the effects the altered receptor has on cell function.

[0091] Using methods well known in the art, an altered sodium channel, or SCN1A protein of the channel, that is causative of epilepsy, including SMEI and related syndromes, may be used to produce antibodies specific for the altered channel or SCN1A protein of the channel or to screen libraries of pharmaceutical agents to identify those that bind the altered channel or SCN1A protein of the channel.

[0092] In one aspect, an antibody, which specifically binds to an altered sodium channel or altered SCN1A protein of the invention, may be used directly as an agonist, antagonist or modulator, or indirectly as a targeting or delivery mechanism for bringing a pharmaceutical agent to cells or tissues that express the altered channel.

[0093] In a still further aspect of the invention there is provided an antibody which is immunologically reactive with a polypeptide as described above, but not with a wild-type SCN1A channel or SCN1A protein thereof.

[0094] In particular, there is provided an antibody which specifically binds to a polypeptide as described above or to an assembled sodium channel containing an alteration in the SCN1A protein that forms part of the channel, which is causative of epilepsy, including SMEI or an SMEI-related syndrome. Such antibodies may include, but are not limited to, polyclonal, monoclonal, chimeric, and single chain antibodies as would be understood by the person skilled in the art.

[0095] For the production of antibodies, various hosts including rabbits, rats, goats, mice, humans, and others may be immunized by injection with a polypeptide as described above or with any fragment or oligopeptide thereof which has immunogenic properties. Various adjuvants may be used to increase immunological response and include, but are not limited to, Freund's, mineral gels such as aluminium hydroxide, and surface-active substances such as lysolecithin. Adjuvants used in humans include BCG (bacilli Calmette-Guerin) and Corynebacterium parvum.

[0096] It is preferred that the oligopeptides, peptides, or fragments used to induce antibodies to the altered sodium channel, or altered SCN1A protein thereof, have an amino acid sequence consisting of at least 5 amino acids, and, more preferably, of at least 10 amino acids. It is also preferable that these oligopeptides, peptides, or fragments are identical to a portion of the amino acid sequence of the natural protein and contain the entire amino acid sequence of a small, naturally occurring molecule. Short stretches of SCN1A amino acids may be fused with those of another protein, such as KLH, and antibodies to the chimeric molecule may be produced.

[0097] Monoclonal antibodies to an altered sodium channel, or altered SCN1A protein thereof, may be prepared using any technique which provides for the production of antibody molecules by continuous cell lines in culture. These include, but are not limited to, the hybridoma technique, the human B-cell hybridoma technique, and the EBV-hybridoma technique. (For example, see Kohler et al., 1975; Kozbor et al., 1985; Cote et al., 1983; Cole et al., 1984).

[0098] Monoclonal antibodies produced may include, but are not limited to, mouse-derived antibodies, humanised antibodies and fully human antibodies.

[0099] Antibodies may also be produced by inducing in vivo production in the lymphocyte population or by screening immunoglobulin libraries or panels of highly specific binding reagents as disclosed in the literature. (For example, see Orlandi et al., 1989; Winter and Milstein, 1991).

[0100] Antibody fragments which contain specific binding sites for an altered sodium channel, or altered SCN1A protein thereof, may also be generated. For example, such fragments include, F(ab′)2 fragments produced by pepsin digestion of the antibody molecule and Fab fragments generated by reducing the disulfide bridges of the F(ab′)2 fragments. Alternatively, Fab expression libraries may be constructed to allow rapid and easy identification of monoclonal Fab fragments with the desired specificity. (For example, see Huse et al., 1989).

[0101] Various immunoassays may be used for screening to identify antibodies having the desired specificity. Numerous protocols for competitive binding or immunoradiometric assays using either polyclonal or monoclonal antibodies with established specificities are well known in the art. Such immunoassays typically involve the measurement of complex formation between an ion channel and its specific antibody. A two-site, monoclonal-based immunoassay utilizing antibodies reactive to two non-interfering sodium channel epitopes is preferred, but a competitive binding assay may also be employed.

[0102] In a further aspect of the invention there is provided a method of treating epilepsy, including SMEI or an SMEI-related syndrome, in a subject, comprising administering an isolated nucleic acid molecule which is the complement (antisense) of any one of the nucleic acid molecules described above and which encodes an RNA molecule that hybridizes with the mRNA encoding an altered SCN1A of the invention, to said subject t.

[0103] In a still further aspect of the invention there is provided the use of an isolated nucleic acid molecule which is the complement (antisense) of a nucleic acid molecule of the invention and which encodes an RNA molecule that hybridizes with the mRNA encoding an altered SCN1A of the invention, in the manufacture of a medicament for the treatment of epilepsy, including SMEI or an SMEI-related syndrome.

[0104] Typically, a vector expressing the complement (antisense) of the polynucleotides of the invention may be administered to a subject in need of such treatment. Many methods for introducing vectors into cells or tissues are available and equally suitable for use in vivo, in vitro, and ex vivo. For ex vivo therapy, vectors may be introduced into stem cells taken from the patient and clonally propagated for autologous transplant back into that same patient. Delivery by transfection, by liposome injections, or by polycationic amino polymers may be achieved using methods which are well known in the art. (For example, see Goldman et al., 1997).

[0105] Additional antisense or gene-targeted silencing strategies may include, but are not limited to, the use of antisense oligonucleotides, injection of antisense RNA, transfection of antisense RNA expression vectors, and the use of RNA interference (RNAi) or short interfering RNAs (siRNA). Still further, catalytic nucleic acid molecules such as DNAzymes and ribozymes may be used for gene silencing (Breaker and Joyce, 1994; Haseloff and Gerlach, 1988). These molecules function by cleaving their target mRNA molecule rather than merely binding to it as in traditional antisense approaches.

[0106] In a further aspect, a suitable agonist, antagonist or modulator may include peptides, phosphopeptides or small organic or inorganic compounds that can restore wild-type activity of sodium channels containing alterations in SCN1A protein of the receptor as described above.

[0107] Peptides, phosphopeptides or small organic or inorganic compounds suitable for therapeutic applications may be identified using nucleic acids and peptides of the invention in drug screening applications as described below. Molecules identified from these screens may also be of therapeutic application in affected individuals carrying other sodium channel alterations, or individuals carrying alterations in genes other than those comprising the sodium channel, if the molecule is able to correct the common underlying functional deficit imposed by these alterations and those of the invention.

[0108] There is therefore provided a method of treating epilepsy, including SMEI or an SMEI-related syndrome comprising administering a compound that is a suitable agonist, antagonist or modulator of a sodium channel and that has been identified using altered SCN1A of the invention.

[0109] In some instances, an appropriate approach for treatment may be combination therapy. This may involve the administering an antibody, an agonist, antagonist or modulator, or complement (antisense) to an altered sodium channel, or altered SCN1A protein thereof, of the invention to inhibit its functional effect, combined with administration of wild-type SCN1A which may restore levels of wild-type sodium channel formation to normal levels. Wild-type SCN1A can be administered using gene therapy approaches as described above for complement administration.

[0110] There is therefore provided a method of treating epilepsy, including SMEI or an SMEI-related syndrome in a subject comprising administration of an antibody, an agonist, antagonist or modulator, or complement to an altered sodium channel, or altered SCN1A protein thereof, of the invention in combination with administration of wild-type SCN1A to said subject.

[0111] In still another aspect of the invention there is provided the use of an antibody, an agonist, antagonist or modulator, or complement to an altered sodium channel, or altered SCN1A protein thereof, of the invention in combination with the use of wild-type SCN1A, in the manufacture of a medicament for the treatment of epilepsy, including SMEI or an SMEI-related syndrome.

[0112] In further embodiments, any of the agonists, antagonists, modulators, antibodies, complementary sequences or vectors of the invention may be administered alone or in combination with other appropriate therapeutic agents. Selection of the appropriate agents may be made by those skilled in the art, according to conventional pharmaceutical principles. The combination of therapeutic agents may act synergistically to effect the treatment or prevention of the various disorders described above. Using this approach, therapeutic efficacy with lower dosages of each agent may be possible, thus reducing the potential for adverse side effects.

[0113] Any of the therapeutic methods described above may be applied to any subject in need of such therapy, including, for example, mammals such as dogs, cats, cows, horses, rabbits, monkeys, and most preferably, humans.

### Drug Screening

[0114] According to still another aspect of the invention, nucleic acid molecules of the invention as well as peptides of the invention, particularly purified altered SCN1A protein and cells expressing these, are useful for the screening of candidate pharmaceutical compounds for the treatment of epilepsy, including SMEI or an SMEI-related syndrome.

[0115] Still further, it provides the use of an altered sodium channel polypeptide complex for the screening of candidate pharmaceutical compounds.

[0116] Still further, it provides the use wherein high throughput screening techniques are employed.

[0117] Compounds that can be screened in accordance with the invention include, but are not limited to peptides (such as soluble peptides), phosphopeptides and small organic or inorganic molecules (such as natural product or synthetic chemical libraries and peptidomimetics).

[0118] In one embodiment, a screening assay may include a cell-based assay utilising eukaryotic or prokaryotic host cells that are stably transformed with recombinant molecules expressing the polypeptides or fragments of the invention, in competitive binding assays. Binding assays will measure the formation of complexes between an altered sodium channel, or altered SCN1A protein thereof, and the compound being tested, or will measure the degree to which a compound being tested will inhibit or restore the formation of a complex between an altered sodium channel, or altered SCN1A protein thereof, and its interactor or ligand.

[0119] The invention is particularly useful for screening compounds by using the polypeptides of the invention in transformed cells, transfected or injected oocytes, or animal models bearing altered SCN1A such as transgenic animals or gene targeted (knock-in) animals (see transformed hosts). Drug candidates can be added to cultured cells that express an altered SCN1A protein (appropriate wild-type sodium channel subunits such as SCN1B should also be expressed for receptor assembly), can be added to oocytes transfected or injected with an altered SCN1A protein (appropriate wild-type sodium channel subunits such as SCN1B must also be injected for receptor assembly), or can be administered to an animal model expressing an altered SCN1A protein. Determining the ability of the test compound to modulate altered sodium channel activity can be accomplished by a number of techniques known in the art. These include for example measuring the effect on the current of the channel as compared to the current of a cell or animal containing the wild-type sodium channel.

[0120] Current in cells can be measured by a number of approaches including the patch-clamp technique (methods described in Hamill et al, 1981) or using fluorescence based assays as are known in the art (see Gonzalez et al., 1999). Drug candidates that alter the current to a more normal level are useful for treating or preventing epilepsy, including SMEI.

[0121] Non cell-based assays may also be used for identifying compounds that can inhibit or restore binding between the altered sodium channel, or altered SCN1A protein thereof, of the invention, and their interactors. Such assays are known in the art and include for example AlphaScreen technology (PerkinElmer Life Sciences, MA, USA). This application relies on the use of beads such that each interaction partner is bound to a separate bead via an antibody. Interaction of each partner will bring the beads into proximity, such that laser excitation initiates a number of chemical reactions ultimately leading to fluorophores emitting a light signal. Candidate compounds that inhibit the binding of the altered sodium channel, or altered SCN1A protein thereof, with its interactor will result in loss of light emission, while candidate compounds that restore the binding of the altered sodium channel, or altered SCN1A protein thereof, with its interactor will result in positive light emission. These assays ultimately enable identification and isolation of the candidate compounds.

[0122] High-throughput drug screening techniques may also employ methods as described in WO84/03564. Small peptide test compounds synthesised on a solid substrate can be assayed for altered SCN1A protein or altered sodium channel binding. Bound altered sodium channel or altered SCN1A polypeptide is then detected by methods well known in the art. In a variation of this technique, purified polypeptides of the invention can be coated directly onto plates to identify interacting test compounds.

[0123] The invention also contemplates the use of competition drug screening assays in which neutralizing antibodies capable of specifically binding the altered sodium channel compete with a test compound for binding thereto. In this manner, the antibodies can be used to detect the presence of any peptide that shares one or more antigenic determinants of the altered receptor.

[0124] The polypeptides of the present invention may also be used for screening compounds developed as a result of combinatorial library technology. This provides a way to test a large number of different substances for their ability to modulate activity of a polypeptide. A substance identified as a modulator of polypeptide function may be peptide or non-peptide in nature. Non-peptide “small molecules” are often preferred for many in vivo pharmaceutical applications. In addition, a mimic or mimetic of the substance may be designed for pharmaceutical use. The design of mimetics based on a known pharmaceutically active compound (“lead” compound) is a common approach to the development of novel pharmaceuticals. This is often desirable where the original active compound is difficult or expensive to synthesise or where it provides an unsuitable method of administration. In the design of a mimetic, particular parts of the original active compound that are important in determining the target property are identified. These parts or residues constituting the active region of the compound are known as its pharmacophore. Once found, the pharmacophore structure is modelled according to its physical properties using data from a range of sources including x-ray diffraction data and NMR. A template molecule is then selected onto which chemical groups which mimic the pharmacophore can be added. The selection can be made such that the mimetic is easy to synthesise, is likely to be pharmacologically acceptable, does not degrade in vivo and retains the biological activity of the lead compound. Further optimisation or modification can be carried out to select one or more final mimetics useful for in vivo or clinical testing.

[0125] It is also possible to isolate a target-specific antibody and then solve its crystal structure. In principle, this approach yields a pharmacophore upon which subsequent drug design can be based as described above. It may be possible to avoid protein crystallography altogether by generating anti-idiotypic antibodies (anti-ids) to a functional, pharmacologically active antibody. As a mirror image of a mirror image, the binding site of the anti-ids would be expected to be an analogue of the original receptor. The anti-id could then be used to isolate peptides from chemically or biologically produced peptide banks.

[0126] Another alternative method for drug screening relies on structure-based rational drug design. Determination of the three dimensional structure of the polypeptides of the invention, or the three dimensional structure of the GABA-B receptors which incorporate these polypeptides allows for structure-based drug design to identify biologically active lead compounds.

[0127] Three dimensional structural models can be generated by a number of applications, some of which include experimental models such as x-ray crystallography and NMR and/or from in silico studies of structural databases such as the Protein Databank (PDB). In addition, three dimensional structural models can be determined using a number of known protein structure prediction techniques based on the primary sequences of the polypeptides (e.g. SYBYL Tripos Associated, St. Louis, Mo.), de novo protein structure design programs (e.g. MODELER-MSI Inc., San Diego, Calif., or MOE-Chemical Computing Group, Montreal, Canada) or ab initio methods as described, for example, in U.S. Pat. Nos. 5,331,573 and 5,579,250, the contents of which are incorporated herein by reference.

[0128] Once the three dimensional structure of a polypeptide or polypeptide complex has been determined, structure-based drug discovery techniques can be employed to design biologically-active compounds based on these three dimensional structures. Such techniques are known in the art and include examples such as DOCK (University of California, San Francisco) or AUTODOCK (Scripps Research Institute, La Jolla, Calif.). A computational docking protocol will identify the active site or sites that are deemed important for protein activity based on a predicted protein model. Molecular databases, such as the Available Chemicals Directory (ACD) are then screened for molecules that complement the protein model.

[0129] Using methods such as these, potential clinical drug candidates can be identified and computationally ranked in order to reduce the time and expense associated with typical ‘wet lab’ drug screening methodologies.

[0130] Compounds identified through screening procedures as described above, and which are based on the use of the altered nucleic acid and polypeptides of the invention, can also be tested for their effect on correcting the functional deficit imposed by other gene alterations in affected individuals including other SCN1A alterations.

[0131] Such compounds form a part of the present invention, as do pharmaceutical compositions containing these and a pharmaceutically acceptable carrier.

### Pharmaceutical Preparations

[0132] Compounds identified from screening assays and shown to restore sodium channel wild-type activity can be administered to a patient at a therapeutically effective dose to treat or ameliorate epilepsy, including SMEI, as described above. A therapeutically effective dose refers to that amount of the compound sufficient to result in amelioration of symptoms of the disorder.

[0133] Toxicity and therapeutic efficacy of such compounds can be determined by standard pharmaceutical procedures in cell cultures or experimental animals. The data obtained from these studies can then be used in the formulation of a range of dosages for use in humans.

[0134] Pharmaceutical compositions for use in accordance with the present invention can be formulated in a conventional manner using one or more physiological acceptable carriers, excipients or stabilisers which are well known. Acceptable carriers, excipients or stabilizers are non-toxic at the dosages and concentrations employed, and include buffers such as phosphate, citrate, and other organic acids; antioxidants including absorbic acid; low molecular weight (less than about 10 residues) polypeptides; proteins, such as serum albumin, gelatin, or immunoglobulins; binding agents including hydrophilic polymers such as polyvinylpyrrolidone; amino acids such as glycine, glutamine, asparagine, arginine or lysine; monosaccharides, disaccharides, and other carbohydrates including glucose, mannose, or dextrins; chelating agents such as EDTA; sugar alcohols such as mannitol or sorbitol; salt-forming counterions such as sodium; and/or non-ionic surfactants such as Tween, Pluronics or polyethylene glycol (PEG).

[0135] The formulation of pharmaceutical compositions for use in accordance with the present invention will be based on the proposed route of administration. Routes of administration may include, but are not limited to, inhalation, insufflation (either through the mouth or nose), oral, buccal, rectal or parental administration.

### Microarray

[0136] In further embodiments, complete cDNAs, oligonucleotides or longer fragments derived from any of the SCN1A polynucleotide sequences described herein may be used as probes in a microarray. The microarray can be used to diagnose epilepsy, including SMEI, through the identification of the SCN1A alterations of the invention, to understand the genetic basis of epilepsy, or can be used to develop and monitor the activities of therapeutic agents.

[0137] According to a further aspect of the present invention, tissue material obtained from animal models (see below) generated as a result of the identification of specific SCN1A human alterations of the present invention, can be used in microarray experiments. These experiments can be conducted to identify the level of expression of SCN1A, or the level of expression of any cDNA clone from whole-tissue libraries, in diseased tissue as opposed to normal control tissue. Variations in the expression level of genes, including SCN1A, between the two tissues indicates their possible involvement in the disease process either as a cause or consequence of the original SCN1A alteration present in the animal model. These experiments may also be used to determine gene function, to understand the genetic basis of epilepsy, to diagnose epilepsy, and to develop and monitor the activities of therapeutic agents. Microarrays may be prepared, used, and analyzed using methods known in the art. (For example, see Schena et al., 1996; Heller et al., 1997).

### Transformed Hosts

[0138] The present invention also provides for genetically modified (knock-out, knock-in and transgenic), non-human animal models comprising nucleic acid molecules of the invention. These animals are useful for the study of the function of a sodium channel, to study the mechanisms of epilepsy as related to a sodium channel, for the screening of candidate pharmaceutical compounds, for the creation of explanted mammalian cell cultures which express altered sodium channels, and for the evaluation of potential therapeutic interventions.

[0139] Animal species which are suitable for use in the animal models of the present invention include, but are not limited to, rats, mice, hamsters, guinea pigs, rabbits, dogs, cats, goats, sheep, pigs, and non-human primates such as monkeys and chimpanzees. For initial studies, genetically modified mice and rats are highly desirable due to the relative ease in generating knock-in, knock-out or transgenics of these animals, their ease of maintenance and their shorter life spans. For certain studies, transgenic yeast or invertebrates may be suitable and preferred because they allow for rapid screening and provide for much easier handling. For longer term studies, non-human primates may be desired due to their similarity with humans.

[0140] To create an animal model for an altered sodium channel of the invention, several methods can be employed. These include, but are not limited to, generation of a specific alteration in a homologous animal gene, insertion of a wild type human gene and/or a humanized animal gene by homologous recombination, insertion of an altered human gene as genomic or minigene cDNA constructs using wild type or altered or artificial promoter elements, or insertion of artificially modified fragments of the endogenous gene by homologous recombination. The modifications include insertion of mutant stop codons, the deletion of DNA sequences, or the inclusion of recombination elements (lox p sites) recognized by enzymes such as Cre recombinase.

[0141] To create transgenic mice in order to study gain of gene function in vivo, a SCN1A alteration of the invention can be inserted into a mouse germ line using standard techniques such as oocyte microinjection. Gain of gene function can mean the over-expression of a gene and its protein product, or the genetic complementation of a mutation of the gene under investigation. For oocyte injection, one or more copies of the mutant gene can be inserted into the pronucleus of a just-fertilized mouse oocyte. This oocyte is then reimplanted into a pseudo-pregnant foster mother. The live-born mice can then be screened for integrants using analysis of tail DNA for the presence of the relevant human SCN1A gene sequence. The transgene can be either a complete genomic sequence injected as a YAC, BAC, PAC or other chromosome DNA fragment, a cDNA with either the natural promoter or a heterologous promoter, or a minigene containing all of the coding region and other elements found to be necessary for optimum expression.

[0142] To generate knock-out mice or knock-in mice, gene targeting through homologous recombination in mouse embryonic stem (ES) cells may be applied. Knock-out mice are generated to study loss of gene function in vivo while knock-in mice (which are preferred) allow the study of gain of function or to study the effect of specific gene mutations. Knock-in mice are similar to transgenic mice however the integration site and copy number are defined in the former.

[0143] For knock-out mouse generation, gene targeting vectors can be designed such that they delete (knock-out) the protein coding sequence of the SCN1A gene in the mouse genome. In contrast, knock-in mice can be produced whereby a gene targeting vector containing the relevant altered SCN1A gene can integrate into a defined genetic locus in the mouse genome. For both applications, homologous recombination is catalysed by specific DNA repair enzymes that recognise homologous DNA sequences and exchange them via double crossover.

[0144] Gene targeting vectors are usually introduced into ES cells using electroporation. ES cell integrants are then isolated via an antibiotic resistance gene present on the targeting vector and are subsequently genotyped to identify those ES cell clones in which the gene under investigation has integrated into the locus of interest. The appropriate ES cells are then transmitted through the germline to produce a novel mouse strain.

[0145] In instances where gene ablation results in early embryonic lethality, conditional gene targeting may be employed. This allows genes to be deleted in a temporally and spatially controlled fashion. As above, appropriate ES cells are transmitted through the germline to produce a novel mouse strain, however the actual deletion of the gene is performed in the adult mouse in a tissue specific or time controlled manner. Conditional gene targeting is most commonly achieved by use of the cre/lox system. The enzyme cre is able to recognise the 34 base pair loxP sequence such that loxP flanked (or floxed) DNA is recognised and excised by cre. Tissue specific cre expression in transgenic mice enables the generation of tissue specific knock-out mice by mating gene targeted floxed mice with cre transgenic mice. Knock-out can be conducted in every tissue (Schwenk et al., 1995) using the ‘deleter’ mouse or using transgenic mice with an inducible cre gene (such as those with tetracycline inducible cre genes), or knock-out can be tissue specific for example through the use of the CD19-cre mouse (Rickert et al., 1997).

[0146] According to still another aspect of the invention there is provided the use of genetically modified non-human animals as described above for the screening of candidate pharmaceutical compounds (see drug screening above). These animals are also useful for the evaluation (eg therapeutic efficacy, toxicity, metabolism) of candidate pharmaceutical compounds, including those identified from the invention as described above, for the treatment of epilepsy, including SMEI and related syndromes.

[0147] Throughout this specification and the claims, the words “comprise”, “comprises” and “comprising” are used in a non-exclusive sense, except where the context requires otherwise.

[0148] It will be apparent to the person skilled in the art that while the invention has been described in some detail for the purposes of clarity and understanding, various modifications and alterations to the embodiments and methods described herein may be made without departing from the scope of the inventive concept disclosed in this specification.

### MODES FOR PERFORMING THE INVENTION

[0149] Any combination of assay systems described above may be employed for the identification of SCN1A mutations potentially causative of SMEI or related syndromes. Provided below are examples of assays that may be employed.

### Example 1

### Patient DNA Collection

[0150] The flowchart in FIG. 1 illustrates a strategy that can be used to determine the likelihood that an alteration in the SCN1A gene is responsible for SMEI. The assay combination chosen is preceded by selecting the patient population to be examined and obtaining DNA from the sample population. The sample population may encompass any individual with epilepsy but would likely focus on children with febrile seizures as well as other patients that are suspected to have myoclonic epilepsy. For the present study, the patient population chosen included individuals that had been diagnosed with SMEI from a clinical analysis or had severe encephalopathies occurring during the first 12 months of life.

[0151] DNA from a test patient may be obtained in a number of ways. The most common approach is to obtain DNA from blood samples taken from the patient, however DNA may also be obtained using less invasive approaches such as from cheek cell swabs.

[0152] For the current study DNA was extracted from collected blood using the QIAamp DNA Blood Maxi kit (Qiagen) according to manufacturers specifications or through procedures adapted from Wyman and White (1980). For DNA samples obtained using the QIAamp kit, a final ethanol precipitation step was employed with DNA pellets being resuspended in sterile water. Stock DNA samples were kept at a concentration of 200 ng/ul and 100 ng/ul dilutions were prepared for subsequent PCR reactions.

### Example 2

### dHPLC Assay

[0153] Once DNA was obtained from the patients, PCR amplification of individual exons of the SCN1A gene was employed prior to analysis by high performance liquid chromatography (dHPLC). The SCN1A gene has 26 exons for which primers were designed to amplify 33 amplicons. Each exon was amplified by a single amplicon except for exons 11, 15 and 16 which are amplified in two amplicons respectively and exon 26 where 5 amplicons were used to amplify the entire exon. Table 1 provides a list of primers that were designed to analyse each exon of the SCN1A gene.

[0154] PCR amplification reactions were performed in a volume of 20 ul and were prepared in 96-well plates. For the majority of amplicons the PCR reaction consisted of 1×PCR buffer (Invitrogen), 200 uM dNTPs, 300 ng of each primer, 1.5 mM MgCl₂, 100 ng DNA and 0.5 units of Taq DNA polymerase (Invitrogen). The above conditions were used for all amplicons except for exon 5, and 26(1) where 1 Unit of Taq DNA polymerase was used.

[0155] The thermal cycling conditions employed for PCR amplification varied according to each exon. For exons 1-4, 6-9, 11(1), 11(2), 12, 14, 15(1), 15(2), 16(2), 19, and 22-24, PCR reactions were performed using 1 cycle of 94° C. for 2 minutes, followed by 10 cycles of 60° C. for 30 seconds, 72° C. for 30 seconds, and 94° C. for 30 seconds, followed by 25 cycles of 55° C. for 30 seconds, 72° C. for 30 seconds, and 94° C. for 30 seconds. A final annealing reaction at 55° C. for 30 seconds followed by an extension reaction for 10 minutes at 72° C. completed the cycling conditions for these amplicons.

[0156] For exon 5, the same conditions were employed as above except the annealing temperature was 62° C. for 10 cycles and then 58° C. for 25 cycles.

[0157] For exons 10, 16(1), 21, 25, 26(1), 26(2), 26(3), 26(4), and 26(5), PCR reactions were performed using 1 cycle of 94° C. for 2 minutes, followed by 10 cycles of 60° C. for 1.5 minutes, 72° C. for 1.5 minutes, and 94° C. for 1.5 minutes, followed by 25 cycles of 55° C. for 1.5 minutes, 72° C. for 1.5 minutes, and 94° C. for 1.5 minutes. A final annealing reaction at 55° C. for 1.5 minutes followed by an extension reaction for 10 minutes at 72° C. completed the cycling conditions for these amplicons.

[0158] For exons 17, 18 and 20, PCR reactions were performed using 1 cycle of 94° C. for 2 minutes, followed by 35 cycles of 50° C. for 30 seconds, 72° C. for 30 seconds, and 94° C. for 30 seconds. A final annealing reaction at 50° C. for 30 seconds followed by an extension reaction for 10 minutes at 72° C. completed the cycling conditions for these amplicons.

[0159] For exon 13, PCR reactions were performed using 1 cycle of 94° C. for 2 minutes, followed by 10 cycles of 94° C. for 1 minute, 64° C. for 1.5 minutes, and 72° C. for 1.5 minutes, followed by 25 cycles of 94° C. for 1 minute, 60° C. for 1.5 minutes, and 72° C. for 1.5 minutes. This was followed by a final extension reaction for 10 minutes at 72° C. to complete the cycling conditions for this amplicon.

[0160] Prior to dHPLC analysis, PCR products were heated to 95° C. for 5 minutes and are then slowly cooled at −3° C. increments for 1.5 minutes (until 25° C. is reached). This is to allow the formation of hetero- and homoduplexes depending upon the nucleotide constitution of the PCR product.

[0161] Various dHPLC systems can be used for heteroduplex analysis and mutation detection. This study used the Transgenomic WAVE® System and the methodology supplied with the system. In order to detect mutations on the dHPLC each product needed to be run under partially denaturing conditions. Due to each amplicon of the SCN1A gene having a different sequence, the temperature(s) at which each product is partially denatured needed to be calculated. Using the Transgenomic software supplied with the dHPLC system the required temperatures for each of the amplicons was determined and is shown in Table 2.

[0162] Amplicons are fed through the dHPLC column according to manufacturers conditions and computer generated chromatograms are compared between patient samples and wild-type samples. The analysis is done by visually looking at the chromatograms and also using the mutation detection Transgenomic software supplied with the HPLC. Those patient samples showing different peak patterns to wild-type are considered to contain alterations in the SCN1A amplicon under investigation and the DNA from those individuals was subject to a further assay, namely DNA sequencing (see example 3 below), to determine the nature of the SCN1A alteration and to predict the likelihood that the alteration was responsible for SMEI or a related syndrome.

### Example 3

### DNA Sequencing Assay

[0163] PCR products from the dHPLC analysis that showed different peak patterns to wild-type may be subject to secondary assays such as DNA sequencing to identify the nature of the alteration. In the present study DNA sequencing was employed. This first involved re-amplification of the amplicon displaying an altered dHPLC chromatogram from the relevant individual followed by purification of the PCR amplified templates for sequencing using QiaQuick PCR preps (Qiagen) based on manufacturers procedures. The primers used to sequence the purified amplicons were identical to those used for the initial amplification step. For each sequencing reaction, 25 ng of primer and 100 ng of purified PCR template were used. The BigDye sequencing kit (ABI) was used for all sequencing reactions according to the manufacturers specifications. The products were run on an ABI 377 Sequencer and analysed using the EditView program.

[0164] A comparison of the DNA sequence obtained from the patient sample was then made directly to that of the wild-type SCN1A sequence in order to identify the nature of the DNA alteration that lead to the change detected by dHPLC.

[0165] The results of the screening of the 33 amplicons of the SCN1A gene are shown in Table 3. A total of 269 patients were analysed with their clinical epilepsy phenotype being hidden during the analysis. A total of 91 samples were shown to have an alteration in the SCN1A gene and of these, 61 samples had a clear SMEI phenotype based on a clinical analysis and 38 samples had a SMEB phenotype based on a clinical analysis. It can therefore be determined that if an SCN1A alteration is found in a patient, then the patient has an 82% chance (50/61) of having SMEI, a 63% chance (24/38) of having SMEB, and a 75% chance (74/99) of having either SMEI or SMEB.

[0166] This likelihood would increase if the alteration identified was one that had previously been associated with SMEI, SMEB or a related syndrome. In addition, based on current opinion (Mulley et al., 2003) the likelihood would further increase if the alteration is not seen in the parents or relatives of the affected individual (i.e. is a de novo alteration) and is still further increased if the alteration is found to result in a major disruption to the protein (such as a truncating alteration). The ability to provide this level of certainty as to a diagnosis of SMEI or a related syndrome will be of benefit when considering therapy regimes for the patient and the avoidance of seizure aggravation induced by such factors as fever associated with vaccinations and other causes.

### Example 4

### Additional Assays—SSCP Assay

[0167] In addition to the assays described above, other assays may be employed to test for the existence of alterations in the SCN1A gene that are associated with SMEI. One such assay is single strand conformation polymorphism (SSCP) analysis. In this technique, DNA obtained from the patient is first PCR amplified for individual exons of the SCN1A gene. The primers employed for dHPLC analysis (see Table 1) may also be used for SSCP analysis.

[0168] In some instances the primers used for SSCP analysis are labelled at their 5′ end with HEX for a fluorescent-based detection approach as used for example in the GelScan 2000 system (Corbett Research, Australia). SSCP PCR reactions and cycling conditions can be performed as described above for dHPLC analysis, however any PCR reaction and cycling conditions may be employed provided that the amplification produces a distinct product specific for the amplicon under investigation only.

[0169] An example of alternative PCR reaction conditions are where the reaction is performed in a total volume of 10 μl containing 67 mM Tris-HCl (pH 8.8); 16.5 mM (NH₄)₂SO₄; 6.5 μM EDTA; 1.5 mM MgCl₂; 200 μM each dNTP; 10% DMSO; 0.17 mg/ml BSA; 10 mM β-mercaptoethanol; 5 μg/ml each primer and 100 U/ml Taq DNA polymerase. PCR cycling conditions may use 10 cycles of 94° C. for 30 seconds, 60° C. for 30 seconds, and 72° C. for 30 seconds followed by 25 cycles of 94° C. for 30 seconds, 55° C. for 30 seconds, and 72° C. for 30 seconds. A final extension reaction for 10 minutes at 72° C. should follow.

[0170] Twenty μl of loading dye comprising 50% (v/v) formamide, 12.5 mM EDTA and 0.02% (w/v) bromophenol blue is then added to completed reactions which are subsequently run on non-denaturing 4% polyacrylamide gels with a cross-linking ratio of 35:1 (acrylamide:bis-acrylamide) and containing 2% glycerol. For analysis of PCR amplicons using the GelScan 2000 system, the gel thickness typically employed is 100 μm, with a width of 168 mm and length of 160 mm. Gels are normally run at 1200 volts and approximately 20 mA, at 22° C. and analysed on the GelScan 2000 system according to manufacturer's specifications. Those amplicons that contain alterations in the SCN1A sequence will migrate through the gel differently than wild-type amplicons due to their altered single strand conformation. A further assay such as DNA sequencing may then be employed (see example 3 above) to determine the nature of the SCN1A alteration in the amplicon.

### Example 5

### Investigation of Full Spectrum of Epileptic Encephalopathies Beginning in the First Year of Life Due to SCN1A Mutations

### Introduction

[0171] The emerging role of mutations of SCN1A, the gene encoding the alpha 1 subunit of the sodium channel, in Severe Myoclonic Epilepsy of Infancy (SMEI, Dravet Syndrome) has been at the forefront of genetic research in epilepsy over the last four years. Molecular studies show that between 35% and 100% of children with the classical picture of SMEI have mutations of SCN1A (Fukuma et al, 2004; Sugawara et al, 2002; Nabbout et al, 2003; Claes et al, 2003; Claes et al, 2001; Ohmori et al, 2002; Wallace et al, 2003; Fujiwara et al, 2003; Ohmori et al, 2003; Kanai et al, 2004; Mulley et al, 2005; Gennaro et al, 2003). In excess of 90% of these mutations arise de novo, with the remainder being familial in origin. These mutations are most frequently truncation mutations located throughout the gene; however, missense mutations also occur with a predilection for the ion channel pore region (S5, S6 and linker) and the C terminus (Kanai et al, 2004; Mulley et al, 2005).

[0172] The related syndrome of Severe Myoclonic Epilepsy of Infancy Borderland (SMEB) describes a group of children who lack some of the key features of SMEI such as generalized spike wave activity or myoclonic seizures (Fukuma et al, 2004). Around 25% of SMEB patients have SCN1A mutations (Fukuma et al, 2004). A subset of SMEB has been described as Intractable Childhood Epilepsy with Tonic-Clonic Seizures (ICEGTC) and Severe Idiopathic Generalised Epilepsy of Infancy with Generalised Tonic-Clonic Seizures by Japanese and German authors, where affected infants only ever have Generalized Tonic-Clonic seizures but follow a similar course to children with SMEI (Fujiwara et al, 2003; Fujiwara et al, 1992; Doose et al, 1998). Around 70% of these patients have missense mutations of SCN1A (Fujiwara et al, 2003). Here, we explore the phenotypic variability associated with SCN1A mutations by investigating 179 patients with onset of epilepsy in their first year of life. The purpose of this study was to investigate the full spectrum of epileptic encephalopathies due to SCN1A mutations.

### Subjects and Methods

[0173] Subjects were recruited from around the world including Australia (135), Canada (27), United Kingdom (26), New Zealand (22), Israel (4), USA (4) and Denmark (1). The principal cohort (group A) of patients (n=179) was enrolled in the study if they had an epileptic encephalopathy beginning in the first year of life. An epileptic encephalopathy was defined as a refractory seizure disorder associated with developmental delay. Group B (n=40) comprised individuals with an epileptic encephalopathy beginning after the first year of life for which no aetiology had been identified and where magnetic resonance imaging had been normal or not shown a definitive cause.

[0174] Electroclinical data were obtained on all patients with specific emphasis on early seizure history including age of onset, occurrence of status epilepticus, presence of fever sensitivity, clinical photic sensitivity, and evolution of other seizure types. A detailed early developmental history was obtained with attention to acquisition of milestones, timing of plateau or regression of development and current functioning. Other important details included neurological examination, family history of seizure disorders, and results of EEG, video-EEG monitoring and neuroimaging studies. Results of other available investigations such as chromosomal analysis were also obtained.

[0175] SMEI was defined according to the following criteria: onset in the first year of life of convulsive seizures which were hemiclonic or generalized, associated with the evolution of myoclonic seizures and other seizure types which could include partial seizures, absence seizures, atonic seizures, tonic seizures; normal development in the first year of life with subsequent slowing which could include plateauing or regression; generalized spike wave activity and either normal MRI or non specific findings.

[0176] SMEB was divided into subgroups based on the absence or presence of specific features that have been regarded as key to the diagnosis of SMEI. For example, SMEB-M was used if the patient did not have myoclonic seizures but otherwise satisfied SMEI criteria. Similarly, SMEB-GSW defined a patient who had all the SMEI criteria but had never had generalized spike wave activity on EEG recordings. SMEB-N referred to a child with the typical early history of SMEI but their development was within normal limits even though they may have had period(s) of relative slowing. SMEB-L was used in one case with the typical course of SMEI but where onset of seizures occurred after 12 months of age. SMEB referred to patients who had more than one feature that was not in keeping with SMEI; for example, where a patient had never had myoclonic seizures and early development was not normal but the history was otherwise in keeping with SMEI.

[0177] Symptomatic Generalized Epilepsy (SG) denoted individuals who have multiple seizure types, generalized sharp and slow activity, and intellectual disability.

[0178] Lennox-Gastaut syndrome (LGS) was used where a patient had tonic seizures with slow generalized spike wave activity with abnormal development (Beaumanoir et al, 2002).

[0179] A further subgroup was called Cryptogenic Partial Epilepsy (CP) where an individual had focal seizures and uni- or multi-focal EEG epileptiform patterns with normal neuroimaging. Many of these individuals had intellectual disability and it is arguable as to whether they should be classified as Symptomatic Partial Epilepsy (SP) without a known cause.

[0180] The Austin Health Human Research Ethics Committee approved this study. Informed consent was obtained from the parents or guardians of all minors and from adult subjects of normal intellect. In the case of adults with intellectual disability, legal consent was obtained from the appropriate government authority.

### Molecular Analysis

[0181] Following clinical classification, molecular analysis was carried out on genomic DNA extracted from patient venous blood samples using the method outlined in Example 1. All 26 exons of SCN1A were PCR amplified using flanking intronic primers (see Table 1) and standard PCR conditions as set out in Example 2. PCR fragments were analyzed by denaturing high performance liquid chromatography (dHPLC) on the Transgenomic WAVE 3500HT instrument as outlined in Example 2. Amplicons showing altered dHPLC chromatogram patterns compared with normal control DNA were sequenced from independent PCR products in both directions on an ABI 3700 sequencer. The methodology employed is described in Example 3.

[0182] The numbering of each mutation was taken from the start codon ATG of the full length SCN1A isoform sequence (Genbank accession number AB093548). In cases where a mutation was detected, the parents' DNA (if available) was checked for the mutation by direct sequencing.

### Results

[0183] We recruited 179 patients with seizure disorders beginning in the first year of life (Group A) and 40 patients with seizure disorders beginning thereafter (Group B). In Group A, the mean and median age of onset was 5.5 months (range 0.03-12 months). In Group B, the mean age of onset was 46.9 months and the median age was 30 months (range 13-264 months). The range of phenotypes represented in groups A and B are shown in Table 4.

[0184] Of the 61 patients with SMEI, 75% (46/61) were found to have a SCN1A mutation. Of the individuals with SMEI, 41/61 (67%) had hemiclonic seizures. Of the 41 individuals with hemiclonic attacks, 35/41 (85%) had SCN1A mutations compared with 6/41 (15%) with hemiclonic seizures and no mutation.

[0185] Of the 42 patients with all subtypes of SMEB, 64% (27/42) had a SCN1A mutation. In the subcategories of SMEB, the presence of SCN1A mutations were: SMEB-SW 73% (11/15), SMEB-M 100% (3/3), SMEB-L 0% (0/1), SMEB-N 100% (2/2), SMEB 61% (11/18) and ICEGTC 33% (1/3).

[0186] SCN1A mutations were also found in one patient with Myoclonic-Astatic Epilepsy, and eleven patients with phenotypes outside of the recognised Generalised Epilepsy with Febrile Seizures Plus (GEFS+) spectrum. The clinical features of these patients are shown in Table 5. Three of these eleven patients represented the group with Symptomatic Multi-Focal Epilepsy (SMFE). The group of patients with SMFE included 7 patients: 43% (3/7) had SCN1A mutations, and all had onset in the first year of life. None of the 12 LGS patients had a SCN1A mutation.

### Discussion

[0187] Mutations of SCN1A are an important cause of epileptic encephalopathies presenting in infancy and childhood. This study expands the phenotypic spectrum of SCN1A defects beyond the currently recognized spectrum of SMEI and SMEB and its subset of ICEGTC (Fukuma et al, 2004; Sugawara et al, 2002; Nabbout et al, 2003; Claes et al, 2003; Claes et al, 2001; Ohmori et al, 2002; Wallace et al, 2003; Fujiwara et al, 2003; Ohmori et al, 2003; Kanai et al, 2004; Mulley et al, 2005).

[0188] Our results show that the phenotypic spectrum of SCN1A also includes patients with Symptomatic Generalized Epilepsy but interestingly, did not include any of the 12 patients with the Lennox-Gastaut syndrome.

[0189] Within the group classified as Cryptogenic Partial Epilepsy, an intriguing subgroup emerged that we coined Symptomatic MultiFocal Epilepsy (SMFE). SMFE is a severe epileptic encephalopathy with cognitive impairment and refractory seizures. Multiple seizure types occur, with the most prominent being focal seizures, typically with varying semiology. Focal myoclonus may occur or even be brought out by specific anti-epileptic drugs known to exacerbate myoclonus. Patients may also have convulsive or non-convulsive status epilepticus, tonic seizures with partial features and tonic-clonic seizures. Interictal EEGs show abundant multifocal epileptiform discharges. These individuals do not have slow generalized spike wave activity on EEG. Their MRI brain scans are normal or show non specific features. They usually have normal early development and then cognitive decline with the refractory seizure disorder, culminating in intellectual disability. Focal neurological signs such as ataxia and spasticity may evolve. Seven patients with SMFE were entered into this study with onset of their seizure disorder between 2 weeks and 40 months.

[0190] SMFE has not been recognized in the International Classification of Epileptic Syndromes (Commission on Classification and Terminology of the International League Against Epilepsy, 1989) but is included in disorders described in the literature by many authors (Blume, 1978; Burnstine et al, 1991; Markand, 1977; Malik et al, 1989; Noriega-Sanchez et al, 1976; Ohtahara et al, 1995; Ohtsuka et al, 1990; Ohtsuka et al, 2000; Yamatogi et al, 2003). Some clinicians regard this phenotype as being the later evolution of a “burnt out” SGE; however, these patients never have the EEG signature of generalized spike wave activity. Japanese authors would include SMFE as falling within their classification of “severe epilepsy with multiple independent spike foci” (MISF), which they further subdivide into partial seizures and generalized seizures (Yamatogi et al, 2003). The large group of MISF includes a heterogeneous array of causes such as tuberous sclerosis, birth asphyxia. In contrast, SFME encompasses those patients without a known cause except genetic factors. SMFE is an important group of patients with a devastating epileptic encephalopathy who are presently difficult to classify. The discovery of SCN1A mutations as the basis of their disorder avoids further potentially invasive investigations for alternative causes and assists in targeting therapy. For example, avoidance of anti-epileptic drugs that exacerbate myoclonic seizures such as vigabatrin and tiagabine, and cautious use of lamotrigine which can increase seizures in SMEI (Guerrini et al, 1998).

[0191] This study confirms previous findings as 75% of 61 patients with SMEI have SCN1A mutations. It also confirms the findings of Nabbout and colleagues that hemiclonic seizures are a manifestation of SCN1A-related SMEI (Nabbout et al, 2003). This is not absolute as 15% of our SMEI cases with hemiclonic attacks were SCN1A negative. In our previous study we found SCN1A mutations in 8 of 24 cases with SMEI principally using the technique of single stranded conformation analysis (SSCA) (Wallace et al, 2003). Here, we retested 14 of these cases using DHPLC and identified a further six with SCN1A mutations. Thus, SSCA had a considerably lower detection rate than the 80% rate estimated in our original paper and brings the overall mutation rate to 14/24 (58%) (Wallace et al, 2003). Our current findings are more in accordance with the SCN1A mutational rates found in the majority of studies of SMEI cohorts which range from 61% (Fukuma et al, 2004), 77% (Sugawara et al, 2002), 83% (Ohmori et al, 2002), 92% (Fujiwara et al, 2003), to 100% (Claes et al, 2003; Claes et al, 2001). The main exception has been the 35% mutation rate found in the Nabbout study based on DHPLC and sequencing (Nabbout et al, 2003).

[0192] Our findings are also concordant with other groups who investigated the SCN1A mutation rate in SMEB. We found 64% of all SMEB cases had mutations which is higher than the 26% found by Fukuma and colleagues (Fukuma et al, 2004). Only one of our 3 patients with ICEGTC had a mutation compared with 7/10 patients studied by Fujiwara and coauthors (Fujiwara et al, 2003).

[0193] The question of whether myoclonic seizures are an essential component of an SMEI phenotype has been contested. Our data suggest that myoclonic seizures are not obligatory as all three of our patients with an SMEI phenotype lacking myoclonic seizures alone (SMEB-M) carried a SCN1A mutation. Similarly, generalized spike wave activity is considered the EEG hallmark of SMEI but we found that 11/15 (73%) of our patients with a SMEI picture without spike wave activity (SMEB-SW) had mutations.

[0194] The intellectual outcome of SMEI has been regarded as universally poor with all patients having cognitive impairment (Dravet et al, 2002). Two of our patients had the classical history of SMEI with all features except cognitive impairment and were of normal intellect later in life (SMEI-N). Both patients had SCN1A mutations. These data are important as it means that the outcome for some patients may be better than generally thought.

[0195] This is the largest study of the role of SCN1A mutations in devastating seizure disorders beginning in the first year of life, as well as in later childhood. It is not surprising that our findings have expanded the phenotypic spectrum. Disorders are initially identified in a “pure cohort” with a specific group of essential features. As the molecular basis is determined, phenotype-genotype correlation results in broadening of the phenotypic spectrum to include milder cases or seemingly unrelated disorders. This is only beginning to be possible in epileptology as SCN1A is the first gene shown to have a role in epilepsies previously regarded as cryptogenic. An important finding is that children with later onset of an epileptic encephalopathy with multifocal features in the setting of normal MRI may have SCN1A mutations as may children with SGE. Thus, we have determined that SCN1A is also implicated in symptomatic epilepsies and suggest that a molecular basis should be considered in all epileptic encephalopathies with normal structural imaging.

TABLE 1
Primer Sequences Used for dHPLC Assay Analysis of SCN1A

| | | | |
|---|---|---|---|
| Exon | Forward Primer | Reverse Primer | Size (bp) |

| | | | |
|---|---|---|---|
| 1 | CCTCTAGCTCATGTTTCATGAC | TGCAGTAGGCAATTAGCAGC | 448 |
| 2 | CTAATTAAGAAGAGATCCAGTGACAG | GCTATAAAGTGCTTACAGATCATGTAC | 356 |
| 3 | CCCTGAATTTTGGCTAAGCTGCAG | CTACATTAAGACACAGTTTCAAAATCC | 263 |
| 4 | GGGCTACGTTTCATTTGTATG | GCAACCTATTCTTAAAGCATAAGACTG | 358 |
| 5 | AGGCTCTTTGTACCTACAGC | CATGTAGGGTCCGTCTCATT | 200 |
| 6 | CACACGTGTTAAGTCTTCATAGT | AGCCCCTCAAGTATTTATCCT | 394 |
| 7 | GAACCTGACCTTCCTGTTCTC | GTTGGCTGTTATCTTCAGTTTC | 241 |
| 8 | AAAGGCAGCAGAACGACTTG | GGATAGAGGAACTCAAGTCTC | 322 |
| 9 | TTGAAAGTTGAAGCCACCAC | CCACCTGCTCTTAGGTACTC | 363 |
| 10 | GCCATGCAAATACTTCAGCCC | CACAACAGTGGTTGATTCAGTTG | 480 |
| 11 (1) | TGAATGCTGAAATCTCCTTCTAC | CTCAGGTTGCTGTTGCGTCTC | 306 |
| 11 (2) | GATAACGAGAGCCGTAGAGAT | TCTGTAGAAACACTGGCTGG | 315 |
| 12 | CATGAAATTCACTGTGTCACC | CAGCTCTTGAATTAGACTGTC | 347 |
| 13 | ATCCTTGGGAGGTTTAGAGT | GCATGAAGGATGGTTGAAAG | 510 |
| 14 | CATTGTGGGAAAATAGCATAAGC | GCTATGCAGAACCCTGATTG | 339 |
| 15 (1) | TGAGACGGTTAGGGCAGATC | AGAAGTCATTCATGTGCCAGC | 348 |
| 15 (2) | GTCTTGGCCATCATCGTCTTC | ACATGTGCACAATGTGCAGG | 350 |
| 16 (1) | GTGGTGTTTCCTTCTCATCAAG | CACTGCTGCCAGTTCCTATAC | 458 |
| 16 (2) | CAACAGTCCTTCATTAGGAAAC | ACCTTCCCACACCTATAGAATC | 353 |
| 17 | CTTGGCAGGCAACTTATTACC | CAAGCTGCACTCCAAATGAAAG | 232 |
| 18 | TGGAAGCAGAGACACTTTATCTAC | GTGCTGTATCACCTTTTCTTAATC | 234 |
| 19 | CCTATTCCAATGAAATGTCATATG | CAAGCTACCTTGAACAGAGAC | 318 |
| 20 | CTACACATTGAATGATGATTCTGT | GCTATATACAATACTTCAGGTTCT | 216 |
| 21 | ACCAGAGATTACTAGGGGAAT | CTGGGCTCATAAACTTGTACTAAC | 513 |
| 22 | ACTGTCTTGGTCCAAAATCTG | TTCGATTAATTTTACCACCTGATC | 267 |
| 23 | AGCACCAGTGACATTTCCAAC | GGCAGAGAAAACACTCCAAGG | 271 |
| 24 | GACACAGTTTTAACCAGTTTG | TGTGAGACAAGCATGCAAGTT | 207 |
| 25 | CAGGGCCAATGACTACTTTGC | CTGATTGCTGGGATGATCTTGAATC | 477 |
| 26 (1) | CAGGACTCTGAACCTTACCTTG | ATTCCAACAGATGGGTTCCCA | 534 |
| 26 (2) | TCCTGCGTTGTTTAACATCGG | AGCGCAGCTGCAAACTGAGAT | 504 |
| 26 (3) | TGGAAGCTCAGTTAAGGGAGA | GTAGTGATTGGCTGATAGGAG | 480 |
| 26 (4) | CCGATGCAACTCAGTTCATGGA | TGCCTTCTTGCTCATGTTTTTCCACA | 555 |
| 26 (5) | AGAGCGATTCATGGCTTCCAATCC | TGCTGACAAGGGGTCACTGTCT | 526 |

Note:
Primer sequences are listed 5′ to 3′. Due to the large size of exons 11, 15, 16, and 26, the exons were split into two or more overlapping amplicons.

TABLE 2
Partial Denaturing Conditions for dHPLC Assay
Analysis of SCN1A Amplicons

| Exon | Temp 1 | Temp 2 | Temp 3 |
|---|---|---|---|
| 1 | 53.0 | 55.2 | 58.8 |
| 2 | 53.5 | 55.2 | 58.0 |
| 3 | 55.9 | — | — |
| 4 | 54.5 | 55.5 | 56.5 |
| 5 | 60.2 | — | — |
| 6 | 53.8 | 57.5 | 58.9 |
| 7 | 56.3 | — | — |
| 8 | 57.9 | — | — |
| 9 | 56.7 | 60.1 | — |
| 10 | 56.0 | 58.5 | 61.0 |
| 11(1) | 57.1 | 60.2 | 61.5 |
| 11(2) | 58.8 | 61.2 | 62.3 |
| 12 | 55.3 | 57.3 | — |
| 13 | 53.8 | 55.2 | 56.4 |
| 14 | 55.4 | 57.9 | — |
| 15(1) | 57.5 | 60.2 | — |
| 15(2) | 58.4 | 60.7 | — |
| 16 (1) | 54.9 | 55.6 | 57.3 |
| 16(2) | 56.1 | — | — |
| 17 | 57.6 | 60.4 | — |
| 18 | 58.5 | — | — |
| 19 | 53.0 | 56.5 | — |
| 20 | 58.5 | — | — |
| 21 | 55.2 | 56.7 | — |
| 22 | 55.5 | — | — |
| 23 | 55.6 | 56.3 | — |
| 24 | 55.6 | 56.7 | — |
| 25 | 53.8 | 55.6 | 56.8 |
| 26(1) | 55.8 | 59.0 | 60.0 |
| 26(2) | 58.5 | — | — |
| 26(3) | 58.5 | 59.8 | — |
| 26(4) | 55.5 | 57.0 | 57.9 |
| 26(5) | 55.1 | 56.6 | — |

Note:
All temperatures are in degrees celcius. Temp 1, Temp 2, and Temp 3 represent the temperatures at which different regions of the amplicon denature during the dHPLC analysis. Some amplicons required 3 partially denaturing temperatures for complete analysis of the amplicon whereas other amplicons required two or less temperatures.

TABLE 3
Novel alterations identified in SCN1A

| | Mutation | Nucleotide | | |
|---|---|---|---|---|
| Patient Diagnosis¹ | Type | Change² | Amino Acid Change² | SEQ ID NOs |
| SMEB | Missense | c235G→C | D79H | 1, 42 |
| SMEB | Missense | c523G→A | A175T | 2, 43 |
| SMEB | Missense | c680T→G | A239T | 3, 44 |
| SMEI | Missense | c2021A→G | D674G | 4, 45 |
| SMEI | Missense | c2348T→G | L783P | 5, 46 |
| SMEI | Missense | c2831T→A | V944E | 6, 47 |
| SMEI | Missense | c2833T→C | F945L | 7, 48 |
| SMEB | Missense | c2849G→A | G950E | 8, 49 |
| SMEI | Missense | c5162C→G | T1721R | 9, 50 |
| SMEI | Missense | c5176T→C | W1726R | 10, 51 |
| SMEI | Missense | c5765T→C | I1922T | 11, 52 |
| SMEB | Nonsense | c1152G→A | W384X | 12, 53 |
| SMEI | Nonsense | c1197C→A | Y399X | 13, 54 |
| SMEI | Nonsense | c2893C→T | Q965X | 14, 55 |
| SMEI | Nonsense | c4573C→T | R1525X | 15, 56 |
| SMEI | Nonsense | c4794T→A | Y1598X | 16, 57 |
| SMEI | Nonsense | c5436G→A | W1812X | 17, 58 |
| SMEI | Nonsense | c5656C→T | R1886X | 18, 59 |
| SMEI | Nonsense | c5710C→T | Q1904X | 19, 60 |
| SMEI | Splice Site | c265 − 1G→A | IVS1 − 1G→A | 20 |
| SMEI | Splice Site | c1028 + 1G→T | IVS7 + 1G→T | 21 |
| SMEI | Splice Site | c1662 + 2T→C | IVS10 + 2T→C | 22 |
| SMEI | Splice Site | c1663 − 1G→C | IVS10 − 1G→C | 23 |
| SMEB | Splice Site | c2589 + 2T→A | IVS14 + 2T→A | 24 |
| SMEI | Splice Site | c2589 + 3A→T | IVS14 + 3A→T | 25 |
| SMEI | Splice Site | c4853 − 14T→G | IVS25 − 14T→G | 26 |
| SMEI | Truncation | c1048_1049delAT | M350fsX355 | 27, 61 |
| SMEI | Truncation | c1055_1056delTG | V352fsX355 | 28, 62 |
| SMEI | Truncation | c1639_1640delAA | K547fsX569 | 29, 63 |
| SMEI | Truncation | c2562delA | G854fsX876 | 30, 64 |
| SMEI | Truncation | c3096delA | E1032fsX1045 | 31, 65 |
| SMEI | Truncation | c3462delT | G1154fsX1163 | 32, 66 |
| SMEB | Truncation | c4949_4950insT | I1650fsX1672 | 33, 67 |
| Non-SMEI (SG³) | Missense | c1876A→G | S626G | 34, 68 |
| Non-SMEI (SP⁴) | Missense | c2584C→G | R862G | 35, 69 |
| Non-SMEI (SG³) | Missense | c2917A→G | M973V | 36, 70 |
| Non-SMEI (PE⁵) | Missense | c3481G→A | A1161T | 37, 71 |
| Non-SMEI (CP⁶) | Missense | c4728T→C | F1543S | 38, 72 |
| Non-SMEI (CP⁶) | Missense | c4786C→T | R1596C | 39, 73 |
| Non-SMEI (CP⁶) | Missense | c4970G→A | R1657H | 40, 74 |
| Non-SMEI (SG³) | Splice Site | c2946 + 1G→T | IVS15 + 1G→T | 41 |

Note:
Non-SMEI refers to an epilepsy phenotype which is not SMEI or a related syndrome;
¹Patient diagnosis was based on the initial clinical observations;
²Numbering is based on the large SCN1A isoform;
³SG = symptomatic generalized;
⁴SP = symptomatic partial;
⁵PE = postencephalitis - unknown aetiology;
⁶CP = cryptogenic partial.

TABLE 4

| Table 4A: Phenotypic breakdown of Group A | n = 179 |
|---|---|
| SMEI | n = 61 |
| SMEB | n = 18 |
| SMEB-SW | n = 15 |
| SMEB-M | n = 3 |
| SMEB-N | n = 2 |
| ICEGTC | n = 3 |
| Generalised Epilepsy with Febrile Seizure Plus | n = 2 |
| Myoclonic-Astatic Epilepsy | n = 5 |
| Early myoclonic encephalopathy | n = 1 |
| Idiopathic Generalised Epilepsy | n = 1 |
| Symptomatic Generalized Epilepsy | n = 17 |
| Lennox-Gastaut Syndrome | n = 9 |
| West Syndrome | n = 5 |
| Idiopathic spasms | n = 1 |
| Cryptogenic generalized epilepsy | n = 1 |
| Symptomatic partial epilepsy | n = 9 |
| Cryptogenic partial epilepsy | n = 9 |
| Post-encephalitis | n = 1 |
| Unclassified | n = 16 |
| Table 4B: Phenotypic breakdown of Group B | n = 40 |
| SMEB-L | n = 1 |
| Myoclonic-Astatic Epilepsy | n = 8 |
| Progressive Myoclonic Epilepsy | n = 1 |
| Idiopathic Generalised Epilepsy | n = 1 |
| Generalised Epilepsy with Febrile Seizure Plus | n = 2 |
| Symptomatic generalized epilepsy | n = 7 |
| Lennox-Gastaut Syndrome | n = 3 |
| Symptomatic partial epilepsy | n = 3 |
| Continuous spike wave in slow wave sleep | n = 1 |
| Cryptogenic partial epilepsy | n = 3 |
| Post-encephalitis | n = 8 |
| Unclassified | n = 2 |

TABLE 5
Clinical features of SCN1A positive patients with diagnosis outside of GEFS+ spectrum

| | | Age | | | | | | |
|---|---|---|---|---|---|---|---|---|
| Patient | Age at | seizure | | | | | SCN1A | De novo |
| No | study | onset | Seizure types | Intellect | Neurological signs | Epilepsy classification | mutation | mutation |
| 1 | 5 y | 18 m | FS, P-SG, SE | Normal | None | Crytpogenic partial epilepsy | missense | unknown |
| 2 | 20 y | 5 m | GTCS, MJ, P, T | Moderate | Ataxia, mild left | Cryptogenic partial epilepsy | missense | unknown |
| | | | | disability | hemiparesis | (SMFE) | | |
| 3 | 14 y | 1.5 m | GTCS, H, At, | Intellectual | None | Symptomatic generalized epilepsy | missense | Y |
| | | | MJ, P, SE | disability | | | | |
| 4 | 23 y | 5.5 m | FS, GTCS | Mild-moderate | Mildly clumsy | Symptomatic generalized epilepsy | missense | Y |
| | | | | disability | | | | |
| 5 | 5 y | 2 m | GTCS, H, | Severe | Increased tone at 3 m, | Symptomatic generalized epilepsy | missense | unknown |
| | | | MJ, P, NCS | Disability | spasmus natans, | | | |
| | | | | | later hypotonic | | | |
| 6 | 35 y | 9 m | FS, GTCS, | Low average | None | Symptomatic generalized epilepsy | missense | unknown |
| | | | MJ, P-SG | | | | | |
| 7 | 3 y | 6 m | FS, GTCS, | Normal | None | Symptomatic generalized epilepsy | Intronic | unknown |
| | | | MJ | | | | change | |
| 8 | 16 y | 7 m | FS, GTCS, | Mild disability | Mild UMN signs R > L, | Cryptogenic partial epilepsy | Frameshift | Y |
| | | | MJ, P, NCS | | unsteady | (SMFE) | truncation | |
| 9 | 21 y | 0.75 m | IS, At, aAb, | Intellectual | Flexed, atrophic, | unclassified | missense | Y |
| | | | T, SE, NCS | disability | hypertonic R | | | |
| | | | | | upper limb | | | |
| 10 | 5 y | 4.5 m | P, H, SE | Intellectual | None | Cryptogenic Partial Epilepsy | missense | unknown |
| | | | | disability | | (SMFE) | | |
| 11 | 3 y | 2.75 m | TCS, T, P, H, | Severe | Cortical visual | Symptomatic Partial Epilepsy | missense | unknown |
| | | | SE | disability | impairment, quadriplegia | | | |

Note:
FS = Febrile Seizures,
aAb = atypical Absence seizure,
At = Atonic seizure,
GTCS = Generalised Tonic Clonic Seizure,
H = Hemiclonic,
IS = Infantile Spasms,
MJ = Myoclonic jerks,
NCS = Nonconvulsive Status Epilepticus,
P = Partial seizures (not hemi-clonic/unilateral),
SE = Status Epilepticus,
SG = secondary generalization,
T = Tonic seizure.

### REFERENCES

[0196] References cited herein are listed on the following pages, and are incorporated herein by this reference.
[0197] Annegers, J F. (1996). The treatment of epilepsy: Principles and practice. Second Edition. (Wyllie E (Ed) Williams and Wilkins).
[0198] Beaumanoir, AaB, W (2002). In: Roger J B M, et al, editor. Epileptic Syndromes in Infancy, Childhood and Adolescence. 2 ed. London: John Libbey & Co Ltd; p. 113-136.
[0199] Berkovic, S F. et al. (1987). Neurology 37: 993-1000.
[0200] Berkovic, S F. et al. (1994). In: Epileptic seizures and syndromes. Wolf, P. (Editor). London: John Libbey. 25-37.
[0201] Blume, W T. (1978). Ann Neurol 4:541-7.
[0202] Bourgeois, B F D. (2003). Epilepsia 44(s2): 27-31.
[0203] Breaker, R R. and Joyce, G F. (1995). Chem. Biol. 2: 655-600.
[0204] Burnstine, T H. et al. (1991). Neurology 41:1223-8.
[0205] Claes, L. et al. (2003). Hum Mutat 21:615-21.
[0206] Claes, L. et al. (2001). Am. J. Hum. Genet. 68: 1327-1332.
[0207] Cole, S P. et al. (1984). Mol. Cell Biochem. 62: 109-120.
[0208] Commission on Classification and Terminology of the International League against Epilepsy. (1989). Epilepsia 30: 389-399.
[0209] Cote, R J. et al. (1983). Proc. Natl. Acad. Sci. USA 80: 2026-2030.
[0210] Doose, H. et al. (1998). Neuropediatrics 29:229-238.
[0211] Dravet, C. et al. (2002). In: Epileptic Syndromes in Infancy, Childhood and Adolescence. 3rd ed. Eastleigh: John Libbey & Co Ltd; p. 81-103.
[0212] Escayg, A. et al. (2000). Nature Genet. 24: 343-345.
[0213] Finkelstein, J. et al. (1990). Genomics 7: 167-172.
[0214] Fujiwara, T. et al. (2003). Brain 126:531-46.
[0215] Fujiwara, T. et al. (1992). Jpn J Psychiatry Neurol 46:297-302.
[0216] Fukuma, G. et al. (2004). Epilepsia 45:140-8.
[0217] Gardiner, M. (2000). J Neurol. 247: 327-334.
[0218] Gennaro, E. et al. (2003). Epileptic Disord 5:21-5.
[0219] Goldman, C K. et al. (1997). Nature Biotechnology 15: 462-466.
[0220] Gonzalez, J E. et al. (1999). Drug Discov. Today 4: 431-439.
[0221] Guerrini, R. et al. Lamotrigine and seizure aggravation in severe myoclonic epilepsy (1998). Epilepsia 39s:508-512.
[0222] Guerrini, R, Dravet, C, Genton, P, et al. Lamotrigine and seizure aggravation in severe myoclonic epilepsy. 1998; Epilepsia 1998; 39, 508-12.
[0223] Hamill, O P. et al. (1981). Pflugers Arch. 391: 85-100.
[0224] Haseloff, J. and Gerlach, W L. (1988). Nature 334: 585-591.
[0225] Heller, R A. et al. (1997). Proc. Natl. Acad. Sci. USA 94: 2150-2155.
[0226] Huse, W D. et al. (1989). Science 246: 1275-1281.
[0227] Kanai, K. et al. (2004). Neurology 63:329-34.
[0228] Kinszler, K W. et al. (1991). Science 251: 1366-1370.
[0229] Kohler, G. and Milstein, C. (1975). Nature 256: 495-497.
[0230] Kozbor, D. et al. (1985). J. Immunol. Methods 81:31-42.
[0231] Malik, S. et al. (1989). Neurology 39:189.
[0232] Markand, O N. (1997). Neurology 27:746-57.
[0233] Maxam, A M. and Gilbert, W. (1977). Proc. Natl. Acad. Sci. USA 74: 560-564.
[0234] Modrich, P. (1991). Ann. Rev. Genet. 25: 229-253.
[0235] Mulley, J C. et al. (2005). Human Mutation 25: 535-542.
[0236] Mulley, J C. et al. (2003). Curr. Opin. Neurol. 16: 171-176.
[0237] Nabbout, R. et al. (2003). Neurology 60: 1961-1967.
[0238] Noriega-Sanchez, A. and Markand, O N. (1976). Neurology 26:667-72.
[0239] Ohmori, I. et al. (2003) Brain Dev. 25:488-93.
[0240] Ohmori, I. et al. (2002). Biochem. Biophys. Res. Commun. 295: 17-23.
[0241] Ohtahara, S. et al. (1995). Psychiatry Clin Neurosci 49:S179-83.
[0242] Ohtsuka, Y. et al. (1990). Jpn J Psychiatry Neurol 44:257-64.
[0243] Ohtsuka, Y. et al. (2000). Epilepsia 41 Suppl 9:14-7.
[0244] Orita, M. et al. (1989). Proc. Natl. Acad. Sci USA 86: 2766-2770.
[0245] Orlandi, R. et al. (1989). Proc. Natl. Acad. Sci. USA 86: 3833-3837.
[0246] Reutens, D C. and Berkovic, S F. (1995). Neurology 45: 1469-1476.
[0247] Rickert, R C. et al. (1997). Nucleic Acids Res. 25: 1317-1318.
[0248] Roger, J. et al. (1992). Epileptic syndromes in infancy, childhood and adolescence. 2nd Edition. London, John Libbey.
[0249] Sanger, F. et al. (1977). Proc. Natl. Acad. Sci. USA 74: 5463-5467.
[0250] Scharf, K D. et al. (1994). Results Probl. Cell Differ. 20: 125-162.
[0251] Scheffer, I E. and Berkovic, S F. (1997). Brain 120: 479-90.
[0252] Scheffer, I E. and Berkovic, S F. (2003). Trends Pharmac. Sci. 24: 428-433.
[0253] Schena, M. et al. (1996). Proc. Natl. Acad. Sci. USA 93: 10614-10619.
[0254] Schwenk, F. et al. (1995). Nucleic Acids Res. 23: 5080-5081.
[0255] Sheffield, V C. et al. (1989). Proc. Natl. Acad. Sci. USA 86: 232-236.
[0256] Singh, R. et al. (1999). Ann. Neurol. 45: 75-81.
[0257] Singh, R. et al. (2001). Epilepsia 42: 837-844.
[0258] Sugawara, T. et al. (2002). Neurology 58: 1122-1124.
[0259] Sutton, G C. (1990). The principles and practice of medical genetics. Second Edition. (Churchill Livingstone, NY).
[0260] Taylor, G R. and Deeble, J. (1999). Gen. Anal. Biomolec. Engin. 14: 181-186.
[0261] Veggiotti, P. et al. (2001). Epileptic. Disord. 3: 29-32.
[0262] Wallace, R. et al. (2003). Neurology 61:765-769.
[0263] Wallace, et al. (1998). Nature Genet. 19: 366-370.
[0264] Wartell, R M. et al. (1990). Nucleic Acids Res. 18: 2699-2705.
[0265] Winter, G. and Milstein, C. (1991). Nature 349: 293-299.
[0266] Wyman, A R. and White, R. (1980). Proc. Natl. Acad. Sci. 77: 6754-6758.
[0267] Yamatogi, Y. and Ohtahara, S. (2003). J Clin Neurophysiol 20:442-8.

1. A method for the diagnosis of an epilepsy syndrome, including SMEI or an SMEI-related syndrome, in a patient comprising:
(1) testing for an alteration in the SCN1A gene in a sample obtained from the patient; and
(2) if an alteration is identified, comparing said alteration to any one of those listed in Table 3,
wherein if said alteration is identical to any one of those listed in Table 3, a diagnosis of an epilepsy syndrome, including SMEI or an SMEI-related syndrome, in said patient is made in accordance with the correlation set forth in Table 3.

2. A method as claimed in claim 1, comprising performing one or more assays to test for the existence of an SCN1A alteration and to identify the nature of the alteration.

3. A method as claimed in claim 2 wherein DNA sequencing is undertaken.

4. A method as claimed in claim 1 comprising:
(1) performing one or more assays to test for the existence of an alteration in the SCN1A gene of the patient; and, if the results indicate the existence of an alteration in the SCN1A gene,
(2) performing one or more assays to identify the nature of the SCN1A alteration.

5. A method as claimed in claim 4, wherein dHPLC or SSCP is undertaken to test for the existence of an alteration in the SCN1A gene.

6. A method as claimed in claim 5, wherein DNA sequencing is undertaken to identify the nature of the alteration if one is detected.

7. A method for the diagnosis of an epilepsy sub-syndrome selected from the group consisting of SMEI, SMEB, cryptogenic partial epilepsy (CP), symptomatic generalised epilepsy (SG), symptomatic partial epilepsy (SP) and postencephalitis with unknown aetiology (PE), in a patient comprising:
(1) detecting an alteration in the SCN1A gene in a sample obtained from the patient; and
(2) comparing said alteration to any one of those listed in Table 3,
wherein if said alteration is identical to any one of those listed in Table 3, a diagnosis of the epilepsy sub-syndrome is made in accordance with the correlation set forth in Table 3.

8. A method as claimed in claim 7, comprising performing one or more assays to test for the existence of an SCN1A alteration and to identify the nature of the alteration.

9. A method as claimed in claim 8, wherein DNA sequencing is undertaken.

10. A method as claimed in claim 7 comprising:
(1) performing one or more assays to test for the existence of an alteration in the SCN1A gene of the patient; and, if the results indicate the existence of an alteration in the SCN1A gene,
(2) performing one or more assays to identify the nature of the SCN1A alteration.

11. A method as claimed in claim 10, wherein dHPLC or SSCP is undertaken to test for the existence of an alteration in the SCN1A gene.

12. A method as claimed in claim 11, wherein DNA sequencing is undertaken to identify the nature of the alteration if one is detected.

13. A method for the diagnosis of SMEI or a related syndrome in a patient comprising:
(1) detecting an alteration in the SCN1A gene in a patient sample; and
(2) ascertaining whether the alteration is known to be associated with SMEI or a related syndrome or not associated with SMEI or a related syndrome or, if not known to be either, determining the likelihood that it is an alteration associated with SMEI or a related syndrome,
wherein the alteration which is known to be associated with SMEI or an SMEI-related syndrome, or known not to be associated with SMEI or an SMEI-related syndrome is selected from any one of those alterations shown in Table 3 in accordance with the correlation made in Table 3.

14. A method as claimed in claim 13, further comprising establishing a diagnosis which will indicate a high probability of SMEI or an SMEI-related syndrome where the alteration is known to be associated with SMEI or an SMEI-related syndrome.

15. A method as claimed in claim 13, further comprising establishing a diagnosis which will indicate a low probability of SMEI or an SMEI-related syndrome where the alteration is known not to be associated with SMEI or an SMEI-related syndrome.

16. A method as claimed in claim 13, wherein the likelihood that the alteration is associated with SMEI or an SMEI-related syndrome is established through:
(1) considering genetic data for parents and/or relatives; and
(2) establishing whether the alteration has arisen de novo or is inherited.

17. A method as claimed in claim 16, further comprising establishing whether the alteration would result in a major disruption to the SCN1A protein.

18. A method as claimed in claim 17, wherein the alteration is a truncating mutation.

19. A method as claimed in claim 13, comprising establishing a diagnosis which will indicate a low probability of SMEI or an SMEI-related syndrome in the case of an inherited mutation, a high probability of SMEI or an SMEI-related syndrome in the case of a de novo mutation, and a very high probability of SMEI or an SMEI-related syndrome where a de novo mutation would result in a major disruption to the SCN1A protein.

20. A method as claimed in any one of claims 13 to 19, comprising performing one or more assays to test for the existence of an SCN1A alteration and to identify the nature of the alteration.

21. A method as claimed in any one claims 13 to 19 comprising:
(1) performing one or more assays to test for the existence of an alteration in the SCN1A gene of the patient; and, if the results indicate the existence of an alteration in the SCN1A gene,
(2) performing one or more assays to identify the nature of the SCN1A alteration.

22. A method as claimed in claim 21, wherein dHPLC or SSCP is undertaken to test for the existence of an alteration in the SCN1A gene.

23. A method as claimed in claim 22, wherein DNA sequencing is undertaken to identify the nature of the alteration if one is detected.

24. A method of determining the appropriate treatment for a patient suspected of having SMEI or an SMEI-related syndrome comprising:
(1) performing one or more of the methods as claimed in any one claims 1 to 23; and
(2) correlating the diagnosis reached with known indications and contra-indications for patients which have SMEI or an SMEI-related syndrome.

25. A method of determining the likelihood of adverse results from treatments of a patient suspected of having SMEI or an SMEI-related syndrome, including drug treatments and vaccinations, comprising:
(1) performing one or more of the methods as claimed in any one of claims 1 to 23; and
(2) correlating the diagnosis reached with known indications and contra-indications for patients which have SMEI or an SMEI-related syndrome.

26. An isolated nucleic acid molecule which encodes an altered SCN1A subunit of a mammalian voltage-gated sodium channel, wherein the alteration gives rise to a phenotype of SMEI or an SMEI-related syndrome, and wherein said nucleic acid molecule comprises an alteration identified as such in Table 3.

27. An isolated nucleic acid molecule according to claim 26, wherein said nucleic acid molecule has the sequence set forth in any one of SEQ ID NOs: 1 to 33.

28. An isolated nucleic acid molecule which encodes an altered SCN1A subunit of a mammalian voltage-gated sodium channel, wherein the alteration gives rise to an epilepsy phenotype which is not SMEI or an SMEI-related syndrome, and wherein said nucleic acid molecule comprises an alteration identified as such in Table 3.

29. An isolated nucleic acid molecule according to claim 28, wherein said nucleic acid molecule has the sequence set forth in any one of SEQ ID NOs: 34 to 41.

30. An isolated nucleic acid molecule comprising the nucleotide sequence set forth in any one of SEQ ID NOs: 1 to 41.

31. An isolated nucleic acid molecule consisting of the nucleotide sequence set forth in any one of SEQ ID NOs: 1 to 41.

32. An expression vector comprising a nucleic acid molecule as claimed in any one of claims 26 to 31.

33. A cell comprising a nucleic acid molecule as claimed in any one of claims 26 to 31.

34. A genetically modified non-human animal comprising a nucleic acid molecule as claimed in any one of claims 26 to 31.

35. A genetically modified non-human animal as claimed in claim 34 in which the animal is selected from the group consisting of rats, mice, hamsters, guinea pigs, rabbits, dogs, cats, goats, sheep, pigs and non-human primates such as monkeys and chimpanzees.

36. An isolated polypeptide, said polypeptide being an altered SCN1A subunit of a mammalian voltage-gated sodium channel, wherein the alteration gives rise to a phenotype of SMEI or an SMEI-related syndrome, and wherein said polypeptide comprises an alteration identified as such in Table 3.

37. An isolated polypeptide according to claim 36, wherein said polypeptide has the sequence set forth in any one of SEQ ID NOs: 42 to 67.

38. An isolated polypeptide, said polypeptide being an altered SCN1A subunit of a mammalian voltage-gated sodium channel, wherein the alteration gives rise to an epilepsy phenotype which is not SMEI or an SMEI-related syndrome, and wherein said polypeptide comprises an alteration identified as such in Table 3.

39. An isolated polypeptide according to claim 38, wherein said polypeptide has the sequence set forth in any one of SEQ ID NOs: 68 to 74.

40. An isolated polypeptide comprising the amino acid sequence set forth in any one of SEQ ID NOs: 42 to 74.

41. An isolated polypeptide consisting of the amino acid sequence set forth in any one of SEQ ID NOs: 42 to 74.

42. A sodium channel which incorporates an SCN1A subunit as claimed in any one of claims 36 to 41.

43. A method of preparing a polypeptide comprising the steps of:
(1) culturing a cell as claimed in claim 33 under conditions effective for polypeptide production; and
(2) harvesting the polypeptide.

44. A polypeptide prepared by the method of claim 43.

45. An antibody which specifically binds to a polypeptide as claimed in any one of claim 36 to 41 or 44, or a sodium channel as claimed in claim 42, but not with a wild-type sodium channel.

46. An antibody as claimed in claim 45, which is selected from the group consisting of a monoclonal antibody, a humanised antibody, a chimeric antibody or an antibody fragment including a Fab fragment, (Fab′)2 fragment, Fv fragment, single chain antibodies and single domain antibodies.

47. The use of a nucleic acid molecule as claimed in any one of claims 26 to 31 for the diagnosis of an epilepsy syndrome, including SMEI or an SMEI-related syndrome.

48. The use of a polypeptide as claimed in any one of claim 36 to 41 or 44 for the diagnosis of an epilepsy syndrome, including SMEI or an SMEI-related syndrome.

49. The use of an antibody as claimed in claim 45 or claim 46 for the diagnosis of an epilepsy syndrome, including SMEI or an SMEI-related syndrome.

50. The use of a nucleic acid molecule as claimed in any one of claims 26 to 31 for the screening of candidate pharmaceutical compounds.

51. The use of a polypeptide as claimed in any one of claim 36 to 41 or 44, a sodium channel as claimed in claim 42, or an antibody as claimed in claim 45 or claim for the screening of candidate pharmaceutical compounds.

52. The use of genetically modified non-human animal as claimed in claim 34 or claim 35 or a cell as claimed in claim 33 in the screening of candidate pharmaceutical compounds.

53. A method of treating epilepsy, including SMEI or an SMEI-related syndrome, in a subject, said method comprising administering a selective antagonist, agonist or modulator of a polypeptide as claimed in any one of claim 36 to 41 or 44 or a sodium channel as claimed in claim 42, to said subject.

54. The use of a selective antagonist, agonist or modulator of a polypeptide as claimed in any one of claim 36 to 41 or 44 or a sodium channel as claimed in claim 42, in the manufacture of a medicament for the treatment of epilepsy, including SMEI or an SMEI-related syndrome.

55. A method of treating epilepsy, including SMEI or an SMEI-related syndrome, in a subject, said method comprising administering an isolated nucleic acid molecule which is the complement (antisense) of a nucleic acid molecule as claimed in any one of claims 26 to 31 and which encodes an RNA molecule that hybridizes with the mRNA encoding an altered SCN1A protein to said subject.

56. The use of an isolated nucleic acid molecule which is the complement (antisense) of a nucleic acid molecule as claimed in any one of claims 26 to 31 and which encodes an RNA molecule that hybridizes with the mRNA encoding an altered SCN1A polypeptide in the manufacture of a medicament for the treatment of epilepsy, including SMEI or an SMEI-related syndrome.

57. A method of treating epilepsy, including SMEI or an SMEI-related syndrome, comprising administration of an antibody as claimed in claim 45 or claim 46.

58. The use of an antibody as claimed in claim 45 or claim 46 in the manufacture of a medicament for the treatment of epilepsy, including SMEI or an SMEI-related syndrome.

59. A method of treating epilepsy, including SMEI or an SMEI-related syndrome, in a subject, said method comprising administering an antibody, as claimed in claim 45 or claim 46, administration of an agonist, antagonist or modulator of a polypeptide as claimed in any one of claim 36 to 41 or 44, or a sodium channel as claimed in claim 42, or administration of a DNA molecule which is the complement of a nucleic acid molecule as claimed in any one of claims 26 to 31 and which encodes an RNA molecule that hybridizes with the mRNA encoding an altered SCN1A protein, in combination with administration of the wild-type SCN1A, to said subject.

60. The use of an antibody, as claimed in claim 45 or claim 46, use of an agonist, antagonist or modulator of a polypeptide as claimed in any one of claim 36 to 41 or 44, or a sodium channel as claimed in claim 42, or use of a DNA molecule which is the complement of a nucleic acid molecule as claimed in any one of claims 26 to 31 and which encodes an RNA molecule that hybridizes with the mRNA encoding an altered SCN1A protein, in combination with the use of the wild-type SCN1A, in the manufacture of a medicament for the treatment of epilepsy, including SMEI or an SMEI-related syndrome.

The application's sequence listing, which the Patent Office published only in electronic form, follows.

SEQUENCE LISTING (74 sequences)

SEQ ID NO: 1 - DNA, 8381 bp, Homo sapiens
atactgcagaggtctctggtgcatgtgtgtatgtgtgcgtttgtgtgtgtttgtgtgtctgtgtgttctgccccagtgagactgcagcccttgtaaatactttgacaccttttgcaagaaggaatctgaacaattgcaactgaaggcacattgttatcatctcgtctttgggtgatgctgttcctcactgcagatggataattttccttttaatcaggaatttcatatgcagaataaatggtaattaaaatgtgcaggatgacaagatggagcaaacagtgcttgtaccaccaggacctgacagcttcaacttcttcaccagagaatctcttgcggctattgaaagacgcattgcagaagaaaaggcaaagaatcccaaaccagacaaaaaagatgacgacgaaaatggcccaaagccaaatagtgacttggaagctggaaagaaccttccatttatttatggagacattcctccagagatggtgtcagagcccctggagcacctggacccctactatatcaataagaaaacttttatagtattgaataaattgaaggccatcttccggttcagtgccacctctgccctgtacattttaactcccttcaatcctcttaggaaaatagctattaagattttggtacattcattattcagcatgctaattatgtgcactattttgacaaactgtgtgtttatgacaatgagtaaccctcctgattggacaaagaatgtagaatacaccttcacaggaatatatacttttgaatcacttataaaaattattgcaaggggattctgtttagaagattttactttccttcgggatccatggaactggctcgatttcactgtcattacatttgcgtacgtcacagagtttgtggacctgggcaatgtctcggcattgagaacattcagagttctccgagcattgaagacgatttcagtcattccaggcctgaaaaccattgtgggagccctgatccagtctgtgaagaagctctcagatgtaatgatcctgactgtgttctgtctgagcgtatttgctctaattgggctgcagctgttcatgggcaacctgaggaataaatgtatacaatggcctcccaccaatgcttccttggaggaacatagtatagaaaagaatataactgtgaattataatggtacacttataaatgaaactgtctttgagtttgactggaagtcatatattcaagattcaagatatcattatttcctggagggttttttagatgcactactatgtggaaatagctctgatgcaggccaatgtccagagggatatatgtgtgtgaaagctggtagaaatcccaattatggctacacaagctttgataccttcagttgggcttttttgtccttgtttcgactaatgactcaggacttctgggaaaatctttatcaactgacattacgtgctgctgggaaaacgtacatgatattttttgtattggtcattttcttgggctcattctacctaataaatttgatcctggctgtggtggccatggcctacgaggaacagaatcaggccaccttggaagaagcagaacagaaagaggccgaatttcagcagatgattgaacagcttaaaaagcaacaggaggcagctcagcaggcagcaacggcaactgcctcagaacattccagagagcccagtgcagcaggcaggctctcagacagctcatctgaagcctctaagttgagttccaagagtgctaaggaaagaagaaatcggaggaagaaaagaaaacagaaagagcagtctggtggggaagagaaagatgaggatgaattccaaaaatctgaatctgaggacagcatcaggaggaaaggttttcgcttctccattgaagggaaccgattgacatatgaaaagaggtactcctccccacaccagtctttgttgagcatccgtggctccctattttcaccaaggcgaaatagcagaacaagccttttcagctttagagggcgagcaaaggatgtgggatctgagaacgacttcgcagatgatgagcacagcacctttgaggataacgagagccgtagagattccttgtttgtgccccgacgacacggagagagacgcaacagcaacctgagtcagaccagtaggtcatcccggatgctggcagtgtttccagcgaatgggaagatgcacagcactgtggattgcaatggtgtggtttccttggttggtggaccttcagttcctacatcgcctgttggacagcttctgccagaggtgataatagataagccagctactgatgacaatggaacaaccactgaaactgaaatgagaaagagaaggtcaagttctttccacgtttccatggactttctagaagatccttcccaaaggcaacgagcaatgagtatagccagcattctaacaaatacagtagaagaacttgaagaatccaggcagaaatgcccaccctgttggtataaattttccaacatattcttaatctgggactgttctccatattggttaaaagtgaaacatgttgtcaacctggttgtgatggacccatttgttgacctggccatcaccatctgtattgtcttaaatactcttttcatggccatggagcactatccaatgacggaccatttcaataatgtgcttacagtaggaaacttggttttcactgggatctttacagcagaaatgtttctgaaaattattgccatggatccttactattatttccaagaaggctggaatatctttgacggttttattgtgacgcttagcctggtagaacttggactcgccaatgtggaaggattatctgttctccgttcatttcgattgctgcgagttttcaagttggcaaaatcttggccaacgttaaatatgctaataaagatcatcggcaattccgtgggggctctgggaaatttaaccctcgtcttggccatcatcgtcttcatttttgccgtggtcggcatgcagctctttggtaaaagctacaaagattgtgtctgcaagatcgccagtgattgtcaactcccacgctggcacatgaatgacttcttccactccttcctgattgtgttccgcgtgctgtgtggggagtggatagagaccatgtgggactgtatggaggttgctggtcaagccatgtgccttactgtcttcatgatggtcatggtgattggaaacctagtggtcctgaatctctttctggccttgcttctgagctcatttagtgcagacaaccttgcagccactgatgatgataatgaaatgaataatctccaaattgctgtggataggatgcacaaaggagtagcttatgtgaaaagaaaaatatatgaatttattcaacagtccttcattaggaaacaaaagattttagatgaaattaaaccacttgatgatctaaacaacaagaaagacagttgtatgtccaatcatacaacagaaattgggaaagatcttgactatcttaaagatgtaaatggaactacaagtggtataggaactggcagcagtgttgaaaaatacattattgatgaaagtgattacatgtcattcataaacaaccccagtcttactgtgactgtaccaattgctgtaggagaatctgactttgaaaatttaaacacggaagactttagtagtgaatcggatctggaagaaagcaaagagaaactgaatgaaagcagtagctcatcagaaggtagcactgtggacatcggcgcacctgtagaagaacagcccgtagtggaacctgaagaaactcttgaaccagaagcttgtttcactgaaggctgtgtacaaagattcaagtgttgtcaaatcaatgtggaagaaggcagaggaaaacaatggtggaacctgagaaggacgtgtttccgaatagttgaacataactggtttgagaccttcattgttttcatgattctccttagtagtggtgctctggcatttgaagatatatatattgatcagcgaaagacgattaagacgatgttggaatatgctgacaaggttttcacttacattttcattctggaaatgcttctaaaatgggtggcatatggctatcaaacatatttcaccaatgcctggtgttggctggacttcttaattgttgatgtttcattggtcagtttaacagcaaatgccttgggttactcagaacttggagccatcaaatctctcaggacactaagagctctgagacctctaagagccttatctcgatttgaagggatgagggtggttgtgaatgcccttttaggagcaattccatccatcatgaatgtgcttctggtttgtcttatattctggctaattttcagcatcatgggcgtaaatttgtttgctggcaaattctaccactgtattaacaccacaactggtgacaggtttgacatcgaagacgtgaataatcatactgattgcctaaaactaatagaaagaaatgagactgctcgatggaaaaatgtgaaagtaaactttgataatgtaggatttgggtatctctctttgcttcaagttgccacattcaaaggatggatggatataatgtatgcagcagttgattccagaaatgtggaactccagcctaagtatgaaaaaagtctgtacatgtatctttactttgttattttcatcatctttgggtccttcttcaccttgaacctgtttattggtgtcatcatagataatttcaaccagcagaaaaagaagtttggaggtcaagacatctttatgacagaagaacagaagaaatactataatgcaatgaaaaaattaggatcgaaaaaaccgcaaaagcctatacctcgaccaggaaacaaatttcaaggaatggtctttgacttcgtaaccagacaagtttttgacataagcatcatgattctcatctgtcttaacatggtcacaatgatggtggaaacagatgaccagagtgaatatgtgactaccattttgtcacgcatcaatctggtgttcattgtgctatttactggagagtgtgtactgaaactcatctctctacgccattattattttaccattggatggaatatttttgattttgtggttgtcattctctccattgtaggtatgtttcttgccgagctgatagaaaagtatttcgtgtcccctaccctgttccgagtgatccgtcttgctaggattggccgaatcctacgtctgatcaaaggagcaaaggggatccgcacgctgctctttgctttgatgatgtcccttcctgcgttgtttaacatcggcctcctactcttcctagtcatgttcatctacgccatctttgggatgtccaactttgcctatgttaagagggaagttgggatcgatgacatgttcaactttgagacctttggcaacagcatgatctgcctattccaaattacaacctctgctggctgggatggattgctagcacccattctcaacagtaagccacccgactgtgaccctaataaagttaaccctggaagctcagttaagggagactgtgggaacccatctgttggaattttcttttttgtcagttacatcatcatatccttcctggttgtggtgaacatgtacatcgcggtcatcctggagaacttcagtgttgctactgaagaaagtgcagagcctctgagtgaggatgactttgagatgttctatgaggtttgggagaagtttgatcccgatgcaactcagttcatggaatttgaaaaattatctcagtttgcagctgcgcttgaaccgcctctcaatctgccacaaccaaacaaactccagctcattgccatggatttgcccatggtgagtggtgaccggatccactgtcttgatatcttatttgcttttacaaagcgggttctaggagagagtggagagatggatgctctacgaatacagatggaagagcgattcatggcttccaatccttccaaggtctcctatcagccaatcactactactttaaaacgaaaacaagaggaagtatctgctgtcattattcagcgtgcttacagacgccaccttttaaagcgaactgtaaaacaagcttcctttacgtacaataaaaacaaaatcaaaggtggggctaatcttcttataaaagaagacatgataattgacagaataaatgaaaactctattacagaaaaaactgatctgaccatgtccactgcagcttgtccaccttcctatgaccgggtgacaaagccaattgtggaaaaacatgagcaagaaggcaaagatgaaaaagccaaagggaaataaatgaaaataaataaaaataattgggtgacaaattgtttacagcctgtgaaggtgatgtatttttatcaacaggactcctttaggaggtcaatgccaaactgactgtttttacacaaatctccttaaggtcagtgcctacaataagacagtgaccccttgtcagcaaactgtgactctgtgtaaaggggagatgaccttgacaggaggttactgttctcactaccagctgacactgctgaagataagatgcacaatggctagtcagactgtagggaccagtttcaaggggtgcaaacctgtgattttggggttgtttaacatgaaacactttagtgtagtaattgtatccactgtttgcatttcaactgccacatttgtcacatttttatggaatctgttagtggattcatctttttgttaatccatgtgtttattatatgtgactatttttgtaaacgaagtttctgttgagaaataggctaaggacctctataacaggtatgccacctggggggtatggcaaccacatggccctcccagctacacaaagtcgtggtttgcatgagggcatgctgcacttagagatcatgcatgagaaaaagtcacaagaaaaacaaattcttaaatttcaccatatttctgggaggggtaattgggtgataagtggaggtgctttgttgatcttgttttgcgaaatccagcccctagaccaagtagattatttgtgggtaggccagtaaatcttagcaggtgcaaacttcattcaaatgtttggagtcataaatgttatgtttctttttgttgtattaaaaaaaaaacctgaatagtgaatattgcccctcaccctccaccgccagaagactgaattgaccaaaattactctttataaatttctgctttttcctgcactttgtttagccatctttgggctctcagcaaggttgacactgtatatgttaatgaaatgctatttattatgtaaatagtcattttaccctgtggtgcacgtttgagcaaacaaataatgacctaagcacagtatttattgcatcaaatatgtaccacaagaaatgtagagtgcaagctttacacaggtaataaaatgtattctgtaccatttatagatagtttggatgctatcaatgcatgtttatattaccatgctgctgtatctggtttctctcactgctcagaatctcatttatgagaaaccatatgtcagtggtaaagtcaaggaaattgttcaacagatctcatttatttaagtcattaagcaatagtttgcagcactttaacagctttttggttatttttacattttaagtggataacatatggtatatagccagactgtacagacatgtttaaaaaaacacactgcttaacctattaaatatgtgtttagaattttataagcaaatataaatactgtaaaaagtcactttattttatttttcagcattatgtacataaatatgaagaggaaattatcttcaggttgatatcacaatcacttttcttactttctgtccatagtactttttcatgaaagaaatttgctaaataagacatgaaaacaagactgggtagttgtagatttctgctttttaaattacatttgctaattttagattatttcacaattttaaggagcaaaataggttcacgattcatatccaaattatgctttgcaattggaaaagggtttaaaattttatttatatttctggtagtacctgtactaactgaattgaaggtagtgcttatgttatttttgttctttttttctgacttcggtttatgttttcatttctttggagtaatgctgctctagattgttctaaatagaatgtgggcttcataatttttttttccacaaaaacagagtagtcaacttatatagtcaattacatcaggacattttgtgtttcttacagaagcaaaccataggctcctcttttccttaaaactacttagataaactgtattcgtgaactgcatgctggaaaatgctactattatgctaaataatgctaaccaacatttaaaatgtgcaaaactaataaagattacattttttatttt

SEQ ID NO: 2 - DNA, 8381 bp, Homo sapiens
atactgcagaggtctctggtgcatgtgtgtatgtgtgcgtttgtgtgtgtttgtgtgtctgtgtgttctgccccagtgagactgcagcccttgtaaatactttgacaccttttgcaagaaggaatctgaacaattgcaactgaaggcacattgttatcatctcgtctttgggtgatgctgttcctcactgcagatggataattttccttttaatcaggaatttcatatgcagaataaatggtaattaaaatgtgcaggatgacaagatggagcaaacagtgcttgtaccaccaggacctgacagcttcaacttcttcaccagagaatctcttgcggctattgaaagacgcattgcagaagaaaaggcaaagaatcccaaaccagacaaaaaagatgacgacgaaaatggcccaaagccaaatagtgacttggaagctggaaagaaccttccatttatttatggagacattcctccagagatggtgtcagagcccctggaggacctggacccctactatatcaataagaaaacttttatagtattgaataaattgaaggccatcttccggttcagtgccacctctgccctgtacattttaactcccttcaatcctcttaggaaaatagctattaagattttggtacattcattattcagcatgctaattatgtgcactattttgacaaactgtgtgtttatgacaatgagtaaccctcctgattggacaaagaatgtagaatacaccttcacaggaatatatacttttgaatcacttataaaaattattacaaggggattctgtttagaagattttactttccttcgggatccatggaactggctcgatttcactgtcattacatttgcgtacgtcacagagtttgtggacctgggcaatgtctcggcattgagaacattcagagttctccgagcattgaagacgatttcagtcattccaggcctgaaaaccattgtgggagccctgatccagtctgtgaagaagctctcagatgtaatgatcctgactgtgttctgtctgagcgtatttgctctaattgggctgcagctgttcatgggcaacctgaggaataaatgtatacaatggcctcccaccaatgcttccttggaggaacatagtatagaaaagaatataactgtgaattataatggtacacttataaatgaaactgtctttgagtttgactggaagtcatatattcaagattcaagatatcattatttcctggagggttttttagatgcactactatgtggaaatagctctgatgcaggccaatgtccagagggatatatgtgtgtgaaagctggtagaaatcccaattatggctacacaagctttgataccttcagttgggcttttttgtccttgtttcgactaatgactcaggacttctgggaaaatctttatcaactgacattacgtgctgctgggaaaacgtacatgatattttttgtattggtcattttcttgggctcattctacctaataaatttgatcctggctgtggtggccatggcctacgaggaacagaatcaggccaccttggaagaagcagaacagaaagaggccgaatttcagcagatgattgaacagcttaaaaagcaacaggaggcagctcagcaggcagcaacggcaactgcctcagaacattccagagagcccagtgcagcaggcaggctctcagacagctcatctgaagcctctaagttgagttccaagagtgctaaggaaagaagaaatcggaggaagaaaagaaaacagaaagagcagtctggtggggaagagaaagatgaggatgaattccaaaaatctgaatctgaggacagcatcaggaggaaaggttttcgcttctccattgaagggaaccgattgacatatgaaaagaggtactcctccccacaccagtctttgttgagcatccgtggctccctattttcaccaaggcgaaatagcagaacaagccttttcagctttagagggcgagcaaaggatgtgggatctgagaacgacttcgcagatgatgagcacagcacctttgaggataacgagagccgtagagattccttgtttgtgccccgacgacacggagagagacgcaacagcaacctgagtcagaccagtaggtcatcccggatgctggcagtgtttccagcgaatgggaagatgcacagcactgtggattgcaatggtgtggtttccttggttggtggaccttcagttcctacatcgcctgttggacagcttctgccagaggtgataatagataagccagctactgatgacaatggaacaaccactgaaactgaaatgagaaagagaaggtcaagttctttccacgtttccatggactttctagaagatccttcccaaaggcaacgagcaatgagtatagccagcattctaacaaatacagtagaagaacttgaagaatccaggcagaaatgcccaccctgttggtataaattttccaacatattcttaatctgggactgttctccatattggttaaaagtgaaacatgttgtcaacctggttgtgatggacccatttgttgacctggccatcaccatctgtattgtcttaaatactcttttcatggccatggagcactatccaatgacggaccatttcaataatgtgcttacagtaggaaacttggttttcactgggatctttacagcagaaatgtttctgaaaattattgccatggatccttactattatttccaagaaggctggaatatctttgacggttttattgtgacgcttagcctggtagaacttggactcgccaatgtggaaggattatctgttctccgttcatttcgattgctgcgagttttcaagttggcaaaatcttggccaacgttaaatatgctaataaagatcatcggcaattccgtgggggctctgggaaatttaaccctcgtcttggccatcatcgtcttcatttttgccgtggtcggcatgcagctctttggtaaaagctacaaagattgtgtctgcaagatcgccagtgattgtcaactcccacgctggcacatgaatgacttcttccactccttcctgattgtgttccgcgtgctgtgtggggagtggatagagaccatgtgggactgtatggaggttgctggtcaagccatgtgccttactgtcttcatgatggtcatggtgattggaaacctagtggtcctgaatctctttctggccttgcttctgagctcatttagtgcagacaaccttgcagccactgatgatgataatgaaatgaataatctccaaattgctgtggataggatgcacaaaggagtagcttatgtgaaaagaaaaatatatgaatttattcaacagtccttcattaggaaacaaaagattttagatgaaattaaaccacttgatgatctaaacaacaagaaagacagttgtatgtccaatcatacaacagaaattgggaaagatcttgactatcttaaagatgtaaatggaactacaagtggtataggaactggcagcagtgttgaaaaatacattattgatgaaagtgattacatgtcattcataaacaaccccagtcttactgtgactgtaccaattgctgtaggagaatctgactttgaaaatttaaacacggaagactttagtagtgaatcggatctggaagaaagcaaagagaaactgaatgaaagcagtagctcatcagaaggtagcactgtggacatcggcgcacctgtagaagaacagcccgtagtggaacctgaagaaactcttgaaccagaagcttgtttcactgaaggctgtgtacaaagattcaagtgttgtcaaatcaatgtggaagaaggcagaggaaaacaatggtggaacctgagaaggacgtgtttccgaatagttgaacataactggtttgagaccttcattgttttcatgattctccttagtagtggtgctctggcatttgaagatatatatattgatcagcgaaagacgattaagacgatgttggaatatgctgacaaggttttcacttacattttcattctggaaatgcttctaaaatgggtggcatatggctatcaaacatatttcaccaatgcctggtgttggctggacttcttaattgttgatgtttcattggtcagtttaacagcaaatgccttgggttactcagaacttggagccatcaaatctctcaggacactaagagctctgagacctctaagagccttatctcgatttgaagggatgagggtggttgtgaatgcccttttaggagcaattccatccatcatgaatgtgcttctggtttgtcttatattctggctaattttcagcatcatgggcgtaaatttgtttgctggcaaattctaccactgtattaacaccacaactggtgacaggtttgacatcgaagacgtgaataatcatactgattgcctaaaactaatagaaagaaatgagactgctcgatggaaaaatgtgaaagtaaactttgataatgtaggatttgggtatctctctttgcttcaagttgccacattcaaaggatggatggatataatgtatgcagcagttgattccagaaatgtggaactccagcctaagtatgaaaaaagtctgtacatgtatctttactttgttattttcatcatctttgggtccttcttcaccttgaacctgtttattggtgtcatcatagataatttcaaccagcagaaaaagaagtttggaggtcaagacatctttatgacagaagaacagaagaaatactataatgcaatgaaaaaattaggatcgaaaaaaccgcaaaagcctatacctcgaccaggaaacaaatttcaaggaatggtctttgacttcgtaaccagacaagtttttgacataagcatcatgattctcatctgtcttaacatggtcacaatgatggtggaaacagatgaccagagtgaatatgtgactaccattttgtcacgcatcaatctggtgttcattgtgctatttactggagagtgtgtactgaaactcatctctctacgccattattattttaccattggatggaatatttttgattttgtggttgtcattctctccattgtaggtatgtttcttgccgagctgatagaaaagtatttcgtgtcccctaccctgttccgagtgatccgtcttgctaggattggccgaatcctacgtctgatcaaaggagcaaaggggatccgcacgctgctctttgctttgatgatgtcccttcctgcgttgtttaacatcggcctcctactcttcctagtcatgttcatctacgccatctttgggatgtccaactttgcctatgttaagagggaagttgggatcgatgacatgttcaactttgagacctttggcaacagcatgatctgcctattccaaattacaacctctgctggctgggatggattgctagcacccattctcaacagtaagccacccgactgtgaccctaataaagttaaccctggaagctcagttaagggagactgtgggaacccatctgttggaattttcttttttgtcagttacatcatcatatccttcctggttgtggtgaacatgtacatcgcggtcatcctggagaacttcagtgttgctactgaagaaagtgcagagcctctgagtgaggatgactttgagatgttctatgaggtttgggagaagtttgatcccgatgcaactcagttcatggaatttgaaaaattatctcagtttgcagctgcgcttgaaccgcctctcaatctgccacaaccaaacaaactccagctcattgccatggatttgcccatggtgagtggtgaccggatccactgtcttgatatcttatttgcttttacaaagcgggttctaggagagagtggagagatggatgctctacgaatacagatggaagagcgattcatggcttccaatccttccaaggtctcctatcagccaatcactactactttaaaacgaaaacaagaggaagtatctgctgtcattattcagcgtgcttacagacgccaccttttaaagcgaactgtaaaacaagcttcctttacgtacaataaaaacaaaatcaaaggtggggctaatcttcttataaaagaagacatgataattgacagaataaatgaaaactctattacagaaaaaactgatctgaccatgtccactgcagcttgtccaccttcctatgaccgggtgacaaagccaattgtggaaaaacatgagcaagaaggcaaagatgaaaaagccaaagggaaataaatgaaaataaataaaaataattgggtgacaaattgtttacagcctgtgaaggtgatgtatttttatcaacaggactcctttaggaggtcaatgccaaactgactgtttttacacaaatctccttaaggtcagtgcctacaataagacagtgaccccttgtcagcaaactgtgactctgtgtaaaggggagatgaccttgacaggaggttactgttctcactaccagctgacactgctgaagataagatgcacaatggctagtcagactgtagggaccagtttcaaggggtgcaaacctgtgattttggggttgtttaacatgaaacactttagtgtagtaattgtatccactgtttgcatttcaactgccacatttgtcacatttttatggaatctgttagtggattcatctttttgttaatccatgtgtttattatatgtgactatttttgtaaacgaagtttctgttgagaaataggctaaggacctctataacaggtatgccacctggggggtatggcaaccacatggccctcccagctacacaaagtcgtggtttgcatgagggcatgctgcacttagagatcatgcatgagaaaaagtcacaagaaaaacaaattcttaaatttcaccatatttctgggaggggtaattgggtgataagtggaggtgctttgttgatcttgttttgcgaaatccagcccctagaccaagtagattatttgtgggtaggccagtaaatcttagcaggtgcaaacttcattcaaatgtttggagtcataaatgttatgtttctttttgttgtattaaaaaaaaaacctgaatagtgaatattgcccctcaccctccaccgccagaagactgaattgaccaaaattactctttataaatttctgctttttcctgcactttgtttagccatctttgggctctcagcaaggttgacactgtatatgttaatgaaatgctatttattatgtaaatagtcattttaccctgtggtgcacgtttgagcaaacaaataatgacctaagcacagtatttattgcatcaaatatgtaccacaagaaatgtagagtgcaagctttacacaggtaataaaatgtattctgtaccatttatagatagtttggatgctatcaatgcatgtttatattaccatgctgctgtatctggtttctctcactgctcagaatctcatttatgagaaaccatatgtcagtggtaaagtcaaggaaattgttcaacagatctcatttatttaagtcattaagcaatagtttgcagcactttaacagctttttggttatttttacattttaagtggataacatatggtatatagccagactgtacagacatgtttaaaaaaacacactgcttaacctattaaatatgtgtttagaattttataagcaaatataaatactgtaaaaagtcactttattttatttttcagcattatgtacataaatatgaagaggaaattatcttcaggttgatatcacaatcacttttcttactttctgtccatagtactttttcatgaaagaaatttgctaaataagacatgaaaacaagactgggtagttgtagatttctgctttttaaattacatttgctaattttagattatttcacaattttaaggagcaaaataggttcacgattcatatccaaattatgctttgcaattggaaaagggtttaaaattttatttatatttctggtagtacctgtactaactgaattgaaggtagtgcttatgttatttttgttctttttttctgacttcggtttatgttttcatttctttggagtaatgctgctctagattgttctaaatagaatgtgggcttcataatttttttttccacaaaaacagagtagtcaacttatatagtcaattacatcaggacattttgtgtttcttacagaagcaaaccataggctcctcttttccttaaaactacttagataaactgtattcgtgaactgcatgctggaaaatgctactattatgctaaataatgctaaccaacatttaaaatgtgcaaaactaataaagattacattttttatttt

SEQ ID NO: 3 - DNA, 8381 bp, Homo sapiens
atactgcagaggtctctggtgcatgtgtgtatgtgtgcgtttgtgtgtgtttgtgtgtctgtgtgttctgccccagtgagactgcagcccttgtaaatactttgacaccttttgcaagaaggaatctgaacaattgcaactgaaggcacattgttatcatctcgtctttgggtgatgctgttcctcactgcagatggataattttccttttaatcaggaatttcatatgcagaataaatggtaattaaaatgtgcaggatgacaagatggagcaaacagtgcttgtaccaccaggacctgacagcttcaacttcttcaccagagaatctcttgcggctattgaaagacgcattgcagaagaaaaggcaaagaatcccaaaccagacaaaaaagatgacgacgaaaatggcccaaagccaaatagtgacttggaagctggaaagaaccttccatttatttatggagacattcctccagagatggtgtcagagcccctggaggacctggacccctactatatcaataagaaaacttttatagtattgaataaattgaaggccatcttccggttcagtgccacctctgccctgtacattttaactcccttcaatcctcttaggaaaatagctattaagattttggtacattcattattcagcatgctaattatgtgcactattttgacaaactgtgtgtttatgacaatgagtaaccctcctgattggacaaagaatgtagaatacaccttcacaggaatatatacttttgaatcacttataaaaattattgcaaggggattctgtttagaagattttactttccttcgggatccatggaactggctcgatttcactgtcattacatttgcgtacgtcacagagtttgtggacctgggcaatgtctcggcattgagaacattcagagttctccgagcattgaagacgagttcagtcattccaggcctgaaaaccattgtgggagccctgatccagtctgtgaagaagctctcagatgtaatgatcctgactgtgttctgtctgagcgtatttgctctaattgggctgcagctgttcatgggcaacctgaggaataaatgtatacaatggcctcccaccaatgcttccttggaggaacatagtatagaaaagaatataactgtgaattataatggtacacttataaatgaaactgtctttgagtttgactggaagtcatatattcaagattcaagatatcattatttcctggagggttttttagatgcactactatgtggaaatagctctgatgcaggccaatgtccagagggatatatgtgtgtgaaagctggtagaaatcccaattatggctacacaagctttgataccttcagttgggcttttttgtccttgtttcgactaatgactcaggacttctgggaaaatctttatcaactgacattacgtgctgctgggaaaacgtacatgatattttttgtattggtcattttcttgggctcattctacctaataaatttgatcctggctgtggtggccatggcctacgaggaacagaatcaggccaccttggaagaagcagaacagaaagaggccgaatttcagcagatgattgaacagcttaaaaagcaacaggaggcagctcagcaggcagcaacggcaactgcctcagaacattccagagagcccagtgcagcaggcaggctctcagacagctcatctgaagcctctaagttgagttccaagagtgctaaggaaagaagaaatcggaggaagaaaagaaaacagaaagagcagtctggtggggaagagaaagatgaggatgaattccaaaaatctgaatctgaggacagcatcaggaggaaaggttttcgcttctccattgaagggaaccgattgacatatgaaaagaggtactcctccccacaccagtctttgttgagcatccgtggctccctattttcaccaaggcgaaatagcagaacaagccttttcagctttagagggcgagcaaaggatgtgggatctgagaacgacttcgcagatgatgagcacagcacctttgaggataacgagagccgtagagattccttgtttgtgccccgacgacacggagagagacgcaacagcaacctgagtcagaccagtaggtcatcccggatgctggcagtgtttccagcgaatgggaagatgcacagcactgtggattgcaatggtgtggtttccttggttggtggaccttcagttcctacatcgcctgttggacagcttctgccagaggtgataatagataagccagctactgatgacaatggaacaaccactgaaactgaaatgagaaagagaaggtcaagttctttccacgtttccatggactttctagaagatccttcccaaaggcaacgagcaatgagtatagccagcattctaacaaatacagtagaagaacttgaagaatccaggcagaaatgcccaccctgttggtataaattttccaacatattcttaatctgggactgttctccatattggttaaaagtgaaacatgttgtcaacctggttgtgatggacccatttgttgacctggccatcaccatctgtattgtcttaaatactcttttcatggccatggagcactatccaatgacggaccatttcaataatgtgcttacagtaggaaacttggttttcactgggatctttacagcagaaatgtttctgaaaattattgccatggatccttactattatttccaagaaggctggaatatctttgacggttttattgtgacgcttagcctggtagaacttggactcgccaatgtggaaggattatctgttctccgttcatttcgattgctgcgagttttcaagttggcaaaatcttggccaacgttaaatatgctaataaagatcatcggcaattccgtgggggctctgggaaatttaaccctcgtcttggccatcatcgtcttcatttttgccgtggtcggcatgcagctctttggtaaaagctacaaagattgtgtctgcaagatcgccagtgattgtcaactcccacgctggcacatgaatgacttcttccactccttcctgattgtgttccgcgtgctgtgtggggagtggatagagaccatgtgggactgtatggaggttgctggtcaagccatgtgccttactgtcttcatgatggtcatggtgattggaaacctagtggtcctgaatctctttctggccttgcttctgagctcatttagtgcagacaaccttgcagccactgatgatgataatgaaatgaataatctccaaattgctgtggataggatgcacaaaggagtagcttatgtgaaaagaaaaatatatgaatttattcaacagtccttcattaggaaacaaaagattttagatgaaattaaaccacttgatgatctaaacaacaagaaagacagttgtatgtccaatcatacaacagaaattgggaaagatcttgactatcttaaagatgtaaatggaactacaagtggtataggaactggcagcagtgttgaaaaatacattattgatgaaagtgattacatgtcattcataaacaaccccagtcttactgtgactgtaccaattgctgtaggagaatctgactttgaaaatttaaacacggaagactttagtagtgaatcggatctggaagaaagcaaagagaaactgaatgaaagcagtagctcatcagaaggtagcactgtggacatcggcgcacctgtagaagaacagcccgtagtggaacctgaagaaactcttgaaccagaagcttgtttcactgaaggctgtgtacaaagattcaagtgttgtcaaatcaatgtggaagaaggcagaggaaaacaatggtggaacctgagaaggacgtgtttccgaatagttgaacataactggtttgagaccttcattgttttcatgattctccttagtagtggtgctctggcatttgaagatatatatattgatcagcgaaagacgattaagacgatgttggaatatgctgacaaggttttcacttacattttcattctggaaatgcttctaaaatgggtggcatatggctatcaaacatatttcaccaatgcctggtgttggctggacttcttaattgttgatgtttcattggtcagtttaacagcaaatgccttgggttactcagaacttggagccatcaaatctctcaggacactaagagctctgagacctctaagagccttatctcgatttgaagggatgagggtggttgtgaatgcccttttaggagcaattccatccatcatgaatgtgcttctggtttgtcttatattctggctaattttcagcatcatgggcgtaaatttgtttgctggcaaattctaccactgtattaacaccacaactggtgacaggtttgacatcgaagacgtgaataatcatactgattgcctaaaactaatagaaagaaatgagactgctcgatggaaaaatgtgaaagtaaactttgataatgtaggatttgggtatctctctttgcttcaagttgccacattcaaaggatggatggatataatgtatgcagcagttgattccagaaatgtggaactccagcctaagtatgaaaaaagtctgtacatgtatctttactttgttattttcatcatctttgggtccttcttcaccttgaacctgtttattggtgtcatcatagataatttcaaccagcagaaaaagaagtttggaggtcaagacatctttatgacagaagaacagaagaaatactataatgcaatgaaaaaattaggatcgaaaaaaccgcaaaagcctatacctcgaccaggaaacaaatttcaaggaatggtctttgacttcgtaaccagacaagtttttgacataagcatcatgattctcatctgtcttaacatggtcacaatgatggtggaaacagatgaccagagtgaatatgtgactaccattttgtcacgcatcaatctggtgttcattgtgctatttactggagagtgtgtactgaaactcatctctctacgccattattattttaccattggatggaatatttttgattttgtggttgtcattctctccattgtaggtatgtttcttgccgagctgatagaaaagtatttcgtgtcccctaccctgttccgagtgatccgtcttgctaggattggccgaatcctacgtctgatcaaaggagcaaaggggatccgcacgctgctctttgctttgatgatgtcccttcctgcgttgtttaacatcggcctcctactcttcctagtcatgttcatctacgccatctttgggatgtccaactttgcctatgttaagagggaagttgggatcgatgacatgttcaactttgagacctttggcaacagcatgatctgcctattccaaattacaacctctgctggctgggatggattgctagcacccattctcaacagtaagccacccgactgtgaccctaataaagttaaccctggaagctcagttaagggagactgtgggaacccatctgttggaattttcttttttgtcagttacatcatcatatccttcctggttgtggtgaacatgtacatcgcggtcatcctggagaacttcagtgttgctactgaagaaagtgcagagcctctgagtgaggatgactttgagatgttctatgaggtttgggagaagtttgatcccgatgcaactcagttcatggaatttgaaaaattatctcagtttgcagctgcgcttgaaccgcctctcaatctgccacaaccaaacaaactccagctcattgccatggatttgcccatggtgagtggtgaccggatccactgtcttgatatcttatttgcttttacaaagcgggttctaggagagagtggagagatggatgctctacgaatacagatggaagagcgattcatggcttccaatccttccaaggtctcctatcagccaatcactactactttaaaacgaaaacaagaggaagtatctgctgtcattattcagcgtgcttacagacgccaccttttaaagcgaactgtaaaacaagcttcctttacgtacaataaaaacaaaatcaaaggtggggctaatcttcttataaaagaagacatgataattgacagaataaatgaaaactctattacagaaaaaactgatctgaccatgtccactgcagcttgtccaccttcctatgaccgggtgacaaagccaattgtggaaaaacatgagcaagaaggcaaagatgaaaaagccaaagggaaataaatgaaaataaataaaaataattgggtgacaaattgtttacagcctgtgaaggtgatgtatttttatcaacaggactcctttaggaggtcaatgccaaactgactgtttttacacaaatctccttaaggtcagtgcctacaataagacagtgaccccttgtcagcaaactgtgactctgtgtaaaggggagatgaccttgacaggaggttactgttctcactaccagctgacactgctgaagataagatgcacaatggctagtcagactgtagggaccagtttcaaggggtgcaaacctgtgattttggggttgtttaacatgaaacactttagtgtagtaattgtatccactgtttgcatttcaactgccacatttgtcacatttttatggaatctgttagtggattcatctttttgttaatccatgtgtttattatatgtgactatttttgtaaacgaagtttctgttgagaaataggctaaggacctctataacaggtatgccacctggggggtatggcaaccacatggccctcccagctacacaaagtcgtggtttgcatgagggcatgctgcacttagagatcatgcatgagaaaaagtcacaagaaaaacaaattcttaaatttcaccatatttctgggaggggtaattgggtgataagtggaggtgctttgttgatcttgttttgcgaaatccagcccctagaccaagtagattatttgtgggtaggccagtaaatcttagcaggtgcaaacttcattcaaatgtttggagtcataaatgttatgtttctttttgttgtattaaaaaaaaaacctgaatagtgaatattgcccctcaccctccaccgccagaagactgaattgaccaaaattactctttataaatttctgctttttcctgcactttgtttagccatctttgggctctcagcaaggttgacactgtatatgttaatgaaatgctatttattatgtaaatagtcattttaccctgtggtgcacgtttgagcaaacaaataatgacctaagcacagtatttattgcatcaaatatgtaccacaagaaatgtagagtgcaagctttacacaggtaataaaatgtattctgtaccatttatagatagtttggatgctatcaatgcatgtttatattaccatgctgctgtatctggtttctctcactgctcagaatctcatttatgagaaaccatatgtcagtggtaaagtcaaggaaattgttcaacagatctcatttatttaagtcattaagcaatagtttgcagcactttaacagctttttggttatttttacattttaagtggataacatatggtatatagccagactgtacagacatgtttaaaaaaacacactgcttaacctattaaatatgtgtttagaattttataagcaaatataaatactgtaaaaagtcactttattttatttttcagcattatgtacataaatatgaagaggaaattatcttcaggttgatatcacaatcacttttcttactttctgtccatagtactttttcatgaaagaaatttgctaaataagacatgaaaacaagactgggtagttgtagatttctgctttttaaattacatttgctaattttagattatttcacaattttaaggagcaaaataggttcacgattcatatccaaattatgctttgcaattggaaaagggtttaaaattttatttatatttctggtagtacctgtactaactgaattgaaggtagtgcttatgttatttttgttctttttttctgacttcggtttatgttttcatttctttggagtaatgctgctctagattgttctaaatagaatgtgggcttcataatttttttttccacaaaaacagagtagtcaacttatatagtcaattacatcaggacattttgtgtttcttacagaagcaaaccataggctcctcttttccttaaaactacttagataaactgtattcgtgaactgcatgctggaaaatgctactattatgctaaataatgctaaccaacatttaaaatgtgcaaaactaataaagattacattttttatttt

SEQ ID NO: 4 - DNA, 8381 bp, Homo sapiens
atactgcagaggtctctggtgcatgtgtgtatgtgtgcgtttgtgtgtgtttgtgtgtctgtgtgttctgccccagtgagactgcagcccttgtaaatactttgacaccttttgcaagaaggaatctgaacaattgcaactgaaggcacattgttatcatctcgtctttgggtgatgctgttcctcactgcagatggataattttccttttaatcaggaatttcatatgcagaataaatggtaattaaaatgtgcaggatgacaagatggagcaaacagtgcttgtaccaccaggacctgacagcttcaacttcttcaccagagaatctcttgcggctattgaaagacgcattgcagaagaaaaggcaaagaatcccaaaccagacaaaaaagatgacgacgaaaatggcccaaagccaaatagtgacttggaagctggaaagaaccttccatttatttatggagacattcctccagagatggtgtcagagcccctggaggacctggacccctactatatcaataagaaaacttttatagtattgaataaattgaaggccatcttccggttcagtgccacctctgccctgtacattttaactcccttcaatcctcttaggaaaatagctattaagattttggtacattcattattcagcatgctaattatgtgcactattttgacaaactgtgtgtttatgacaatgagtaaccctcctgattggacaaagaatgtagaatacaccttcacaggaatatatacttttgaatcacttataaaaattattgcaaggggattctgtttagaagattttactttccttcgggatccatggaactggctcgatttcactgtcattacatttgcgtacgtcacagagtttgtggacctgggcaatgtctcggcattgagaacattcagagttctccgagcattgaagacgatttcagtcattccaggcctgaaaaccattgtgggagccctgatccagtctgtgaagaagctctcagatgtaatgatcctgactgtgttctgtctgagcgtatttgctctaattgggctgcagctgttcatgggcaacctgaggaataaatgtatacaatggcctcccaccaatgcttccttggaggaacatagtatagaaaagaatataactgtgaattataatggtacacttataaatgaaactgtctttgagtttgactggaagtcatatattcaagattcaagatatcattatttcctggagggttttttagatgcactactatgtggaaatagctctgatgcaggccaatgtccagagggatatatgtgtgtgaaagctggtagaaatcccaattatggctacacaagctttgataccttcagttgggcttttttgtccttgtttcgactaatgactcaggacttctgggaaaatctttatcaactgacattacgtgctgctgggaaaacgtacatgatattttttgtattggtcattttcttgggctcattctacctaataaatttgatcctggctgtggtggccatggcctacgaggaacagaatcaggccaccttggaagaagcagaacagaaagaggccgaatttcagcagatgattgaacagcttaaaaagcaacaggaggcagctcagcaggcagcaacggcaactgcctcagaacattccagagagcccagtgcagcaggcaggctctcagacagctcatctgaagcctctaagttgagttccaagagtgctaaggaaagaagaaatcggaggaagaaaagaaaacagaaagagcagtctggtggggaagagaaagatgaggatgaattccaaaaatctgaatctgaggacagcatcaggaggaaaggttttcgcttctccattgaagggaaccgattgacatatgaaaagaggtactcctccccacaccagtctttgttgagcatccgtggctccctattttcaccaaggcgaaatagcagaacaagccttttcagctttagagggcgagcaaaggatgtgggatctgagaacgacttcgcagatgatgagcacagcacctttgaggataacgagagccgtagagattccttgtttgtgccccgacgacacggagagagacgcaacagcaacctgagtcagaccagtaggtcatcccggatgctggcagtgtttccagcgaatgggaagatgcacagcactgtggattgcaatggtgtggtttccttggttggtggaccttcagttcctacatcgcctgttggacagcttctgccagaggtgataataggtaagccagctactgatgacaatggaacaaccactgaaactgaaatgagaaagagaaggtcaagttctttccacgtttccatggactttctagaagatccttcccaaaggcaacgagcaatgagtatagccagcattctaacaaatacagtagaagaacttgaagaatccaggcagaaatgcccaccctgttggtataaattttccaacatattcttaatctgggactgttctccatattggttaaaagtgaaacatgttgtcaacctggttgtgatggacccatttgttgacctggccatcaccatctgtattgtcttaaatactcttttcatggccatggagcactatccaatgacggaccatttcaataatgtgcttacagtaggaaacttggttttcactgggatctttacagcagaaatgtttctgaaaattattgccatggatccttactattatttccaagaaggctggaatatctttgacggttttattgtgacgcttagcctggtagaacttggactcgccaatgtggaaggattatctgttctccgttcatttcgattgctgcgagttttcaagttggcaaaatcttggccaacgttaaatatgctaataaagatcatcggcaattccgtgggggctctgggaaatttaaccctcgtcttggccatcatcgtcttcatttttgccgtggtcggcatgcagctctttggtaaaagctacaaagattgtgtctgcaagatcgccagtgattgtcaactcccacgctggcacatgaatgacttcttccactccttcctgattgtgttccgcgtgctgtgtggggagtggatagagaccatgtgggactgtatggaggttgctggtcaagccatgtgccttactgtcttcatgatggtcatggtgattggaaacctagtggtcctgaatctctttctggccttgcttctgagctcatttagtgcagacaaccttgcagccactgatgatgataatgaaatgaataatctccaaattgctgtggataggatgcacaaaggagtagcttatgtgaaaagaaaaatatatgaatttattcaacagtccttcattaggaaacaaaagattttagatgaaattaaaccacttgatgatctaaacaacaagaaagacagttgtatgtccaatcatacaacagaaattgggaaagatcttgactatcttaaagatgtaaatggaactacaagtggtataggaactggcagcagtgttgaaaaatacattattgatgaaagtgattacatgtcattcataaacaaccccagtcttactgtgactgtaccaattgctgtaggagaatctgactttgaaaatttaaacacggaagactttagtagtgaatcggatctggaagaaagcaaagagaaactgaatgaaagcagtagctcatcagaaggtagcactgtggacatcggcgcacctgtagaagaacagcccgtagtggaacctgaagaaactcttgaaccagaagcttgtttcactgaaggctgtgtacaaagattcaagtgttgtcaaatcaatgtggaagaaggcagaggaaaacaatggtggaacctgagaaggacgtgtttccgaatagttgaacataactggtttgagaccttcattgttttcatgattctccttagtagtggtgctctggcatttgaagatatatatattgatcagcgaaagacgattaagacgatgttggaatatgctgacaaggttttcacttacattttcattctggaaatgcttctaaaatgggtggcatatggctatcaaacatatttcaccaatgcctggtgttggctggacttcttaattgttgatgtttcattggtcagtttaacagcaaatgccttgggttactcagaacttggagccatcaaatctctcaggacactaagagctctgagacctctaagagccttatctcgatttgaagggatgagggtggttgtgaatgcccttttaggagcaattccatccatcatgaatgtgcttctggtttgtcttatattctggctaattttcagcatcatgggcgtaaatttgtttgctggcaaattctaccactgtattaacaccacaactggtgacaggtttgacatcgaagacgtgaataatcatactgattgcctaaaactaatagaaagaaatgagactgctcgatggaaaaatgtgaaagtaaactttgataatgtaggatttgggtatctctctttgcttcaagttgccacattcaaaggatggatggatataatgtatgcagcagttgattccagaaatgtggaactccagcctaagtatgaaaaaagtctgtacatgtatctttactttgttattttcatcatctttgggtccttcttcaccttgaacctgtttattggtgtcatcatagataatttcaaccagcagaaaaagaagtttggaggtcaagacatctttatgacagaagaacagaagaaatactataatgcaatgaaaaaattaggatcgaaaaaaccgcaaaagcctatacctcgaccaggaaacaaatttcaaggaatggtctttgacttcgtaaccagacaagtttttgacataagcatcatgattctcatctgtcttaacatggtcacaatgatggtggaaacagatgaccagagtgaatatgtgactaccattttgtcacgcatcaatctggtgttcattgtgctatttactggagagtgtgtactgaaactcatctctctacgccattattattttaccattggatggaatatttttgattttgtggttgtcattctctccattgtaggtatgtttcttgccgagctgatagaaaagtatttcgtgtcccctaccctgttccgagtgatccgtcttgctaggattggccgaatcctacgtctgatcaaaggagcaaaggggatccgcacgctgctctttgctttgatgatgtcccttcctgcgttgtttaacatcggcctcctactcttcctagtcatgttcatctacgccatctttgggatgtccaactttgcctatgttaagagggaagttgggatcgatgacatgttcaactttgagacctttggcaacagcatgatctgcctattccaaattacaacctctgctggctgggatggattgctagcacccattctcaacagtaagccacccgactgtgaccctaataaagttaaccctggaagctcagttaagggagactgtgggaacccatctgttggaattttcttttttgtcagttacatcatcatatccttcctggttgtggtgaacatgtacatcgcggtcatcctggagaacttcagtgttgctactgaagaaagtgcagagcctctgagtgaggatgactttgagatgttctatgaggtttgggagaagtttgatcccgatgcaactcagttcatggaatttgaaaaattatctcagtttgcagctgcgcttgaaccgcctctcaatctgccacaaccaaacaaactccagctcattgccatggatttgcccatggtgagtggtgaccggatccactgtcttgatatcttatttgcttttacaaagcgggttctaggagagagtggagagatggatgctctacgaatacagatggaagagcgattcatggcttccaatccttccaaggtctcctatcagccaatcactactactttaaaacgaaaacaagaggaagtatctgctgtcattattcagcgtgcttacagacgccaccttttaaagcgaactgtaaaacaagcttcctttacgtacaataaaaacaaaatcaaaggtggggctaatcttcttataaaagaagacatgataattgacagaataaatgaaaactctattacagaaaaaactgatctgaccatgtccactgcagcttgtccaccttcctatgaccgggtgacaaagccaattgtggaaaaacatgagcaagaaggcaaagatgaaaaagccaaagggaaataaatgaaaataaataaaaataattgggtgacaaattgtttacagcctgtgaaggtgatgtatttttatcaacaggactcctttaggaggtcaatgccaaactgactgtttttacacaaatctccttaaggtcagtgcctacaataagacagtgaccccttgtcagcaaactgtgactctgtgtaaaggggagatgaccttgacaggaggttactgttctcactaccagctgacactgctgaagataagatgcacaatggctagtcagactgtagggaccagtttcaaggggtgcaaacctgtgattttggggttgtttaacatgaaacactttagtgtagtaattgtatccactgtttgcatttcaactgccacatttgtcacatttttatggaatctgttagtggattcatctttttgttaatccatgtgtttattatatgtgactatttttgtaaacgaagtttctgttgagaaataggctaaggacctctataacaggtatgccacctggggggtatggcaaccacatggccctcccagctacacaaagtcgtggtttgcatgagggcatgctgcacttagagatcatgcatgagaaaaagtcacaagaaaaacaaattcttaaatttcaccatatttctgggaggggtaattgggtgataagtggaggtgctttgttgatcttgttttgcgaaatccagcccctagaccaagtagattatttgtgggtaggccagtaaatcttagcaggtgcaaacttcattcaaatgtttggagtcataaatgttatgtttctttttgttgtattaaaaaaaaaacctgaatagtgaatattgcccctcaccctccaccgccagaagactgaattgaccaaaattactctttataaatttctgctttttcctgcactttgtttagccatctttgggctctcagcaaggttgacactgtatatgttaatgaaatgctatttattatgtaaatagtcattttaccctgtggtgcacgtttgagcaaacaaataatgacctaagcacagtatttattgcatcaaatatgtaccacaagaaatgtagagtgcaagctttacacaggtaataaaatgtattctgtaccatttatagatagtttggatgctatcaatgcatgtttatattaccatgctgctgtatctggtttctctcactgctcagaatctcatttatgagaaaccatatgtcagtggtaaagtcaaggaaattgttcaacagatctcatttatttaagtcattaagcaatagtttgcagcactttaacagctttttggttatttttacattttaagtggataacatatggtatatagccagactgtacagacatgtttaaaaaaacacactgcttaacctattaaatatgtgtttagaattttataagcaaatataaatactgtaaaaagtcactttattttatttttcagcattatgtacataaatatgaagaggaaattatcttcaggttgatatcacaatcacttttcttactttctgtccatagtactttttcatgaaagaaatttgctaaataagacatgaaaacaagactgggtagttgtagatttctgctttttaaattacatttgctaattttagattatttcacaattttaaggagcaaaataggttcacgattcatatccaaattatgctttgcaattggaaaagggtttaaaattttatttatatttctggtagtacctgtactaactgaattgaaggtagtgcttatgttatttttgttctttttttctgacttcggtttatgttttcatttctttggagtaatgctgctctagattgttctaaatagaatgtgggcttcataatttttttttccacaaaaacagagtagtcaacttatatagtcaattacatcaggacattttgtgtttcttacagaagcaaaccataggctcctcttttccttaaaactacttagataaactgtattcgtgaactgcatgctggaaaatgctactattatgctaaataatgctaaccaacatttaaaatgtgcaaaactaataaagattacattttttatttt

SEQ ID NO: 5 - DNA, 8381 bp, Homo sapiens
atactgcagaggtctctggtgcatgtgtgtatgtgtgcgtttgtgtgtgtttgtgtgtctgtgtgttctgccccagtgagactgcagcccttgtaaatactttgacaccttttgcaagaaggaatctgaacaattgcaactgaaggcacattgttatcatctcgtctttgggtgatgctgttcctcactgcagatggataattttccttttaatcaggaatttcatatgcagaataaatggtaattaaaatgtgcaggatgacaagatggagcaaacagtgcttgtaccaccaggacctgacagcttcaacttcttcaccagagaatctcttgcggctattgaaagacgcattgcagaagaaaaggcaaagaatcccaaaccagacaaaaaagatgacgacgaaaatggcccaaagccaaatagtgacttggaagctggaaagaaccttccatttatttatggagacattcctccagagatggtgtcagagcccctggaggacctggacccctactatatcaataagaaaacttttatagtattgaataaattgaaggccatcttccggttcagtgccacctctgccctgtacattttaactcccttcaatcctcttaggaaaatagctattaagattttggtacattcattattcagcatgctaattatgtgcactattttgacaaactgtgtgtttatgacaatgagtaaccctcctgattggacaaagaatgtagaatacaccttcacaggaatatatacttttgaatcacttataaaaattattgcaaggggattctgtttagaagattttactttccttcgggatccatggaactggctcgatttcactgtcattacatttgcgtacgtcacagagtttgtggacctgggcaatgtctcggcattgagaacattcagagttctccgagcattgaagacgatttcagtcattccaggcctgaaaaccattgtgggagccctgatccagtctgtgaagaagctctcagatgtaatgatcctgactgtgttctgtctgagcgtatttgctctaattgggctgcagctgttcatgggcaacctgaggaataaatgtatacaatggcctcccaccaatgcttccttggaggaacatagtatagaaaagaatataactgtgaattataatggtacacttataaatgaaactgtctttgagtttgactggaagtcatatattcaagattcaagatatcattatttcctggagggttttttagatgcactactatgtggaaatagctctgatgcaggccaatgtccagagggatatatgtgtgtgaaagctggtagaaatcccaattatggctacacaagctttgataccttcagttgggcttttttgtccttgtttcgactaatgactcaggacttctgggaaaatctttatcaactgacattacgtgctgctgggaaaacgtacatgatattttttgtattggtcattttcttgggctcattctacctaataaatttgatcctggctgtggtggccatggcctacgaggaacagaatcaggccaccttggaagaagcagaacagaaagaggccgaatttcagcagatgattgaacagcttaaaaagcaacaggaggcagctcagcaggcagcaacggcaactgcctcagaacattccagagagcccagtgcagcaggcaggctctcagacagctcatctgaagcctctaagttgagttccaagagtgctaaggaaagaagaaatcggaggaagaaaagaaaacagaaagagcagtctggtggggaagagaaagatgaggatgaattccaaaaatctgaatctgaggacagcatcaggaggaaaggttttcgcttctccattgaagggaaccgattgacatatgaaaagaggtactcctccccacaccagtctttgttgagcatccgtggctccctattttcaccaaggcgaaatagcagaacaagccttttcagctttagagggcgagcaaaggatgtgggatctgagaacgacttcgcagatgatgagcacagcacctttgaggataacgagagccgtagagattccttgtttgtgccccgacgacacggagagagacgcaacagcaacctgagtcagaccagtaggtcatcccggatgctggcagtgtttccagcgaatgggaagatgcacagcactgtggattgcaatggtgtggtttccttggttggtggaccttcagttcctacatcgcctgttggacagcttctgccagaggtgataatagataagccagctactgatgacaatggaacaaccactgaaactgaaatgagaaagagaaggtcaagttctttccacgtttccatggactttctagaagatccttcccaaaggcaacgagcaatgagtatagccagcattctaacaaatacagtagaagaacttgaagaatccaggcagaaatgcccaccctgttggtataaattttccaacatattcttaatctgggactgttctccatattggttaaaagtgaaacatgttgtcaacctggttgtgatggacccatttgttgacctggccatcaccatctgtattgtcttaaatactcgtttcatggccatggagcactatccaatgacggaccatttcaataatgtgcttacagtaggaaacttggttttcactgggatctttacagcagaaatgtttctgaaaattattgccatggatccttactattatttccaagaaggctggaatatctttgacggttttattgtgacgcttagcctggtagaacttggactcgccaatgtggaaggattatctgttctccgttcatttcgattgctgcgagttttcaagttggcaaaatcttggccaacgttaaatatgctaataaagatcatcggcaattccgtgggggctctgggaaatttaaccctcgtcttggccatcatcgtcttcatttttgccgtggtcggcatgcagctctttggtaaaagctacaaagattgtgtctgcaagatcgccagtgattgtcaactcccacgctggcacatgaatgacttcttccactccttcctgattgtgttccgcgtgctgtgtggggagtggatagagaccatgtgggactgtatggaggttgctggtcaagccatgtgccttactgtcttcatgatggtcatggtgattggaaacctagtggtcctgaatctctttctggccttgcttctgagctcatttagtgcagacaaccttgcagccactgatgatgataatgaaatgaataatctccaaattgctgtggataggatgcacaaaggagtagcttatgtgaaaagaaaaatatatgaatttattcaacagtccttcattaggaaacaaaagattttagatgaaattaaaccacttgatgatctaaacaacaagaaagacagttgtatgtccaatcatacaacagaaattgggaaagatcttgactatcttaaagatgtaaatggaactacaagtggtataggaactggcagcagtgttgaaaaatacattattgatgaaagtgattacatgtcattcataaacaaccccagtcttactgtgactgtaccaattgctgtaggagaatctgactttgaaaatttaaacacggaagactttagtagtgaatcggatctggaagaaagcaaagagaaactgaatgaaagcagtagctcatcagaaggtagcactgtggacatcggcgcacctgtagaagaacagcccgtagtggaacctgaagaaactcttgaaccagaagcttgtttcactgaaggctgtgtacaaagattcaagtgttgtcaaatcaatgtggaagaaggcagaggaaaacaatggtggaacctgagaaggacgtgtttccgaatagttgaacataactggtttgagaccttcattgttttcatgattctccttagtagtggtgctctggcatttgaagatatatatattgatcagcgaaagacgattaagacgatgttggaatatgctgacaaggttttcacttacattttcattctggaaatgcttctaaaatgggtggcatatggctatcaaacatatttcaccaatgcctggtgttggctggacttcttaattgttgatgtttcattggtcagtttaacagcaaatgccttgggttactcagaacttggagccatcaaatctctcaggacactaagagctctgagacctctaagagccttatctcgatttgaagggatgagggtggttgtgaatgcccttttaggagcaattccatccatcatgaatgtgcttctggtttgtcttatattctggctaattttcagcatcatgggcgtaaatttgtttgctggcaaattctaccactgtattaacaccacaactggtgacaggtttgacatcgaagacgtgaataatcatactgattgcctaaaactaatagaaagaaatgagactgctcgatggaaaaatgtgaaagtaaactttgataatgtaggatttgggtatctctctttgcttcaagttgccacattcaaaggatggatggatataatgtatgcagcagttgattccagaaatgtggaactccagcctaagtatgaaaaaagtctgtacatgtatctttactttgttattttcatcatctttgggtccttcttcaccttgaacctgtttattggtgtcatcatagataatttcaaccagcagaaaaagaagtttggaggtcaagacatctttatgacagaagaacagaagaaatactataatgcaatgaaaaaattaggatcgaaaaaaccgcaaaagcctatacctcgaccaggaaacaaatttcaaggaatggtctttgacttcgtaaccagacaagtttttgacataagcatcatgattctcatctgtcttaacatggtcacaatgatggtggaaacagatgaccagagtgaatatgtgactaccattttgtcacgcatcaatctggtgttcattgtgctatttactggagagtgtgtactgaaactcatctctctacgccattattattttaccattggatggaatatttttgattttgtggttgtcattctctccattgtaggtatgtttcttgccgagctgatagaaaagtatttcgtgtcccctaccctgttccgagtgatccgtcttgctaggattggccgaatcctacgtctgatcaaaggagcaaaggggatccgcacgctgctctttgctttgatgatgtcccttcctgcgttgtttaacatcggcctcctactcttcctagtcatgttcatctacgccatctttgggatgtccaactttgcctatgttaagagggaagttgggatcgatgacatgttcaactttgagacctttggcaacagcatgatctgcctattccaaattacaacctctgctggctgggatggattgctagcacccattctcaacagtaagccacccgactgtgaccctaataaagttaaccctggaagctcagttaagggagactgtgggaacccatctgttggaattttcttttttgtcagttacatcatcatatccttcctggttgtggtgaacatgtacatcgcggtcatcctggagaacttcagtgttgctactgaagaaagtgcagagcctctgagtgaggatgactttgagatgttctatgaggtttgggagaagtttgatcccgatgcaactcagttcatggaatttgaaaaattatctcagtttgcagctgcgcttgaaccgcctctcaatctgccacaaccaaacaaactccagctcattgccatggatttgcccatggtgagtggtgaccggatccactgtcttgatatcttatttgcttttacaaagcgggttctaggagagagtggagagatggatgctctacgaatacagatggaagagcgattcatggcttccaatccttccaaggtctcctatcagccaatcactactactttaaaacgaaaacaagaggaagtatctgctgtcattattcagcgtgcttacagacgccaccttttaaagcgaactgtaaaacaagcttcctttacgtacaataaaaacaaaatcaaaggtggggctaatcttcttataaaagaagacatgataattgacagaataaatgaaaactctattacagaaaaaactgatctgaccatgtccactgcagcttgtccaccttcctatgaccgggtgacaaagccaattgtggaaaaacatgagcaagaaggcaaagatgaaaaagccaaagggaaataaatgaaaataaataaaaataattgggtgacaaattgtttacagcctgtgaaggtgatgtatttttatcaacaggactcctttaggaggtcaatgccaaactgactgtttttacacaaatctccttaaggtcagtgcctacaataagacagtgaccccttgtcagcaaactgtgactctgtgtaaaggggagatgaccttgacaggaggttactgttctcactaccagctgacactgctgaagataagatgcacaatggctagtcagactgtagggaccagtttcaaggggtgcaaacctgtgattttggggttgtttaacatgaaacactttagtgtagtaattgtatccactgtttgcatttcaactgccacatttgtcacatttttatggaatctgttagtggattcatctttttgttaatccatgtgtttattatatgtgactatttttgtaaacgaagtttctgttgagaaataggctaaggacctctataacaggtatgccacctggggggtatggcaaccacatggccctcccagctacacaaagtcgtggtttgcatgagggcatgctgcacttagagatcatgcatgagaaaaagtcacaagaaaaacaaattcttaaatttcaccatatttctgggaggggtaattgggtgataagtggaggtgctttgttgatcttgttttgcgaaatccagcccctagaccaagtagattatttgtgggtaggccagtaaatcttagcaggtgcaaacttcattcaaatgtttggagtcataaatgttatgtttctttttgttgtattaaaaaaaaaacctgaatagtgaatattgcccctcaccctccaccgccagaagactgaattgaccaaaattactctttataaatttctgctttttcctgcactttgtttagccatctttgggctctcagcaaggttgacactgtatatgttaatgaaatgctatttattatgtaaatagtcattttaccctgtggtgcacgtttgagcaaacaaataatgacctaagcacagtatttattgcatcaaatatgtaccacaagaaatgtagagtgcaagctttacacaggtaataaaatgtattctgtaccatttatagatagtttggatgctatcaatgcatgtttatattaccatgctgctgtatctggtttctctcactgctcagaatctcatttatgagaaaccatatgtcagtggtaaagtcaaggaaattgttcaacagatctcatttatttaagtcattaagcaatagtttgcagcactttaacagctttttggttatttttacattttaagtggataacatatggtatatagccagactgtacagacatgtttaaaaaaacacactgcttaacctattaaatatgtgtttagaattttataagcaaatataaatactgtaaaaagtcactttattttatttttcagcattatgtacataaatatgaagaggaaattatcttcaggttgatatcacaatcacttttcttactttctgtccatagtactttttcatgaaagaaatttgctaaataagacatgaaaacaagactgggtagttgtagatttctgctttttaaattacatttgctaattttagattatttcacaattttaaggagcaaaataggttcacgattcatatccaaattatgctttgcaattggaaaagggtttaaaattttatttatatttctggtagtacctgtactaactgaattgaaggtagtgcttatgttatttttgttctttttttctgacttcggtttatgttttcatttctttggagtaatgctgctctagattgttctaaatagaatgtgggcttcataatttttttttccacaaaaacagagtagtcaacttatatagtcaattacatcaggacattttgtgtttcttacagaagcaaaccataggctcctcttttccttaaaactacttagataaactgtattcgtgaactgcatgctggaaaatgctactattatgctaaataatgctaaccaacatttaaaatgtgcaaaactaataaagattacattttttatttt

SEQ ID NO: 6 - DNA, 8381 bp, Homo sapiens
atactgcagaggtctctggtgcatgtgtgtatgtgtgcgtttgtgtgtgtttgtgtgtctgtgtgttctgccccagtgagactgcagcccttgtaaatactttgacaccttttgcaagaaggaatctgaacaattgcaactgaaggcacattgttatcatctcgtctttgggtgatgctgttcctcactgcagatggataattttccttttaatcaggaatttcatatgcagaataaatggtaattaaaatgtgcaggatgacaagatggagcaaacagtgcttgtaccaccaggacctgacagcttcaacttcttcaccagagaatctcttgcggctattgaaagacgcattgcagaagaaaaggcaaagaatcccaaaccagacaaaaaagatgacgacgaaaatggcccaaagccaaatagtgacttggaagctggaaagaaccttccatttatttatggagacattcctccagagatggtgtcagagcccctggaggacctggacccctactatatcaataagaaaacttttatagtattgaataaattgaaggccatcttccggttcagtgccacctctgccctgtacattttaactcccttcaatcctcttaggaaaatagctattaagattttggtacattcattattcagcatgctaattatgtgcactattttgacaaactgtgtgtttatgacaatgagtaaccctcctgattggacaaagaatgtagaatacaccttcacaggaatatatacttttgaatcacttataaaaattattgcaaggggattctgtttagaagattttactttccttcgggatccatggaactggctcgatttcactgtcattacatttgcgtacgtcacagagtttgtggacctgggcaatgtctcggcattgagaacattcagagttctccgagcattgaagacgatttcagtcattccaggcctgaaaaccattgtgggagccctgatccagtctgtgaagaagctctcagatgtaatgatcctgactgtgttctgtctgagcgtatttgctctaattgggctgcagctgttcatgggcaacctgaggaataaatgtatacaatggcctcccaccaatgcttccttggaggaacatagtatagaaaagaatataactgtgaattataatggtacacttataaatgaaactgtctttgagtttgactggaagtcatatattcaagattcaagatatcattatttcctggagggttttttagatgcactactatgtggaaatagctctgatgcaggccaatgtccagagggatatatgtgtgtgaaagctggtagaaatcccaattatggctacacaagctttgataccttcagttgggcttttttgtccttgtttcgactaatgactcaggacttctgggaaaatctttatcaactgacattacgtgctgctgggaaaacgtacatgatattttttgtattggtcattttcttgggctcattctacctaataaatttgatcctggctgtggtggccatggcctacgaggaacagaatcaggccaccttggaagaagcagaacagaaagaggccgaatttcagcagatgattgaacagcttaaaaagcaacaggaggcagctcagcaggcagcaacggcaactgcctcagaacattccagagagcccagtgcagcaggcaggctctcagacagctcatctgaagcctctaagttgagttccaagagtgctaaggaaagaagaaatcggaggaagaaaagaaaacagaaagagcagtctggtggggaagagaaagatgaggatgaattccaaaaatctgaatctgaggacagcatcaggaggaaaggttttcgcttctccattgaagggaaccgattgacatatgaaaagaggtactcctccccacaccagtctttgttgagcatccgtggctccctattttcaccaaggcgaaatagcagaacaagccttttcagctttagagggcgagcaaaggatgtgggatctgagaacgacttcgcagatgatgagcacagcacctttgaggataacgagagccgtagagattccttgtttgtgccccgacgacacggagagagacgcaacagcaacctgagtcagaccagtaggtcatcccggatgctggcagtgtttccagcgaatgggaagatgcacagcactgtggattgcaatggtgtggtttccttggttggtggaccttcagttcctacatcgcctgttggacagcttctgccagaggtgataatagataagccagctactgatgacaatggaacaaccactgaaactgaaatgagaaagagaaggtcaagttctttccacgtttccatggactttctagaagatccttcccaaaggcaacgagcaatgagtatagccagcattctaacaaatacagtagaagaacttgaagaatccaggcagaaatgcccaccctgttggtataaattttccaacatattcttaatctgggactgttctccatattggttaaaagtgaaacatgttgtcaacctggttgtgatggacccatttgttgacctggccatcaccatctgtattgtcttaaatactcttttcatggccatggagcactatccaatgacggaccatttcaataatgtgcttacagtaggaaacttggttttcactgggatctttacagcagaaatgtttctgaaaattattgccatggatccttactattatttccaagaaggctggaatatctttgacggttttattgtgacgcttagcctggtagaacttggactcgccaatgtggaaggattatctgttctccgttcatttcgattgctgcgagttttcaagttggcaaaatcttggccaacgttaaatatgctaataaagatcatcggcaattccgtgggggctctgggaaatttaaccctcgtcttggccatcatcgtcttcatttttgccgtggtcggcatgcagctctttggtaaaagctacaaagattgtgtctgcaagatcgccagtgattgtcaactcccacgctggcacatgaatgacttcttccactccttcctgattgagttccgcgtgctgtgtggggagtggatagagaccatgtgggactgtatggaggttgctggtcaagccatgtgccttactgtcttcatgatggtcatggtgattggaaacctagtggtcctgaatctctttctggccttgcttctgagctcatttagtgcagacaaccttgcagccactgatgatgataatgaaatgaataatctccaaattgctgtggataggatgcacaaaggagtagcttatgtgaaaagaaaaatatatgaatttattcaacagtccttcattaggaaacaaaagattttagatgaaattaaaccacttgatgatctaaacaacaagaaagacagttgtatgtccaatcatacaacagaaattgggaaagatcttgactatcttaaagatgtaaatggaactacaagtggtataggaactggcagcagtgttgaaaaatacattattgatgaaagtgattacatgtcattcataaacaaccccagtcttactgtgactgtaccaattgctgtaggagaatctgactttgaaaatttaaacacggaagactttagtagtgaatcggatctggaagaaagcaaagagaaactgaatgaaagcagtagctcatcagaaggtagcactgtggacatcggcgcacctgtagaagaacagcccgtagtggaacctgaagaaactcttgaaccagaagcttgtttcactgaaggctgtgtacaaagattcaagtgttgtcaaatcaatgtggaagaaggcagaggaaaacaatggtggaacctgagaaggacgtgtttccgaatagttgaacataactggtttgagaccttcattgttttcatgattctccttagtagtggtgctctggcatttgaagatatatatattgatcagcgaaagacgattaagacgatgttggaatatgctgacaaggttttcacttacattttcattctggaaatgcttctaaaatgggtggcatatggctatcaaacatatttcaccaatgcctggtgttggctggacttcttaattgttgatgtttcattggtcagtttaacagcaaatgccttgggttactcagaacttggagccatcaaatctctcaggacactaagagctctgagacctctaagagccttatctcgatttgaagggatgagggtggttgtgaatgcccttttaggagcaattccatccatcatgaatgtgcttctggtttgtcttatattctggctaattttcagcatcatgggcgtaaatttgtttgctggcaaattctaccactgtattaacaccacaactggtgacaggtttgacatcgaagacgtgaataatcatactgattgcctaaaactaatagaaagaaatgagactgctcgatggaaaaatgtgaaagtaaactttgataatgtaggatttgggtatctctctttgcttcaagttgccacattcaaaggatggatggatataatgtatgcagcagttgattccagaaatgtggaactccagcctaagtatgaaaaaagtctgtacatgtatctttactttgttattttcatcatctttgggtccttcttcaccttgaacctgtttattggtgtcatcatagataatttcaaccagcagaaaaagaagtttggaggtcaagacatctttatgacagaagaacagaagaaatactataatgcaatgaaaaaattaggatcgaaaaaaccgcaaaagcctatacctcgaccaggaaacaaatttcaaggaatggtctttgacttcgtaaccagacaagtttttgacataagcatcatgattctcatctgtcttaacatggtcacaatgatggtggaaacagatgaccagagtgaatatgtgactaccattttgtcacgcatcaatctggtgttcattgtgctatttactggagagtgtgtactgaaactcatctctctacgccattattattttaccattggatggaatatttttgattttgtggttgtcattctctccattgtaggtatgtttcttgccgagctgatagaaaagtatttcgtgtcccctaccctgttccgagtgatccgtcttgctaggattggccgaatcctacgtctgatcaaaggagcaaaggggatccgcacgctgctctttgctttgatgatgtcccttcctgcgttgtttaacatcggcctcctactcttcctagtcatgttcatctacgccatctttgggatgtccaactttgcctatgttaagagggaagttgggatcgatgacatgttcaactttgagacctttggcaacagcatgatctgcctattccaaattacaacctctgctggctgggatggattgctagcacccattctcaacagtaagccacccgactgtgaccctaataaagttaaccctggaagctcagttaagggagactgtgggaacccatctgttggaattttcttttttgtcagttacatcatcatatccttcctggttgtggtgaacatgtacatcgcggtcatcctggagaacttcagtgttgctactgaagaaagtgcagagcctctgagtgaggatgactttgagatgttctatgaggtttgggagaagtttgatcccgatgcaactcagttcatggaatttgaaaaattatctcagtttgcagctgcgcttgaaccgcctctcaatctgccacaaccaaacaaactccagctcattgccatggatttgcccatggtgagtggtgaccggatccactgtcttgatatcttatttgcttttacaaagcgggttctaggagagagtggagagatggatgctctacgaatacagatggaagagcgattcatggcttccaatccttccaaggtctcctatcagccaatcactactactttaaaacgaaaacaagaggaagtatctgctgtcattattcagcgtgcttacagacgccaccttttaaagcgaactgtaaaacaagcttcctttacgtacaataaaaacaaaatcaaaggtggggctaatcttcttataaaagaagacatgataattgacagaataaatgaaaactctattacagaaaaaactgatctgaccatgtccactgcagcttgtccaccttcctatgaccgggtgacaaagccaattgtggaaaaacatgagcaagaaggcaaagatgaaaaagccaaagggaaataaatgaaaataaataaaaataattgggtgacaaattgtttacagcctgtgaaggtgatgtatttttatcaacaggactcctttaggaggtcaatgccaaactgactgtttttacacaaatctccttaaggtcagtgcctacaataagacagtgaccccttgtcagcaaactgtgactctgtgtaaaggggagatgaccttgacaggaggttactgttctcactaccagctgacactgctgaagataagatgcacaatggctagtcagactgtagggaccagtttcaaggggtgcaaacctgtgattttggggttgtttaacatgaaacactttagtgtagtaattgtatccactgtttgcatttcaactgccacatttgtcacatttttatggaatctgttagtggattcatctttttgttaatccatgtgtttattatatgtgactatttttgtaaacgaagtttctgttgagaaataggctaaggacctctataacaggtatgccacctggggggtatggcaaccacatggccctcccagctacacaaagtcgtggtttgcatgagggcatgctgcacttagagatcatgcatgagaaaaagtcacaagaaaaacaaattcttaaatttcaccatatttctgggaggggtaattgggtgataagtggaggtgctttgttgatcttgttttgcgaaatccagcccctagaccaagtagattatttgtgggtaggccagtaaatcttagcaggtgcaaacttcattcaaatgtttggagtcataaatgttatgtttctttttgttgtattaaaaaaaaaacctgaatagtgaatattgcccctcaccctccaccgccagaagactgaattgaccaaaattactctttataaatttctgctttttcctgcactttgtttagccatctttgggctctcagcaaggttgacactgtatatgttaatgaaatgctatttattatgtaaatagtcattttaccctgtggtgcacgtttgagcaaacaaataatgacctaagcacagtatttattgcatcaaatatgtaccacaagaaatgtagagtgcaagctttacacaggtaataaaatgtattctgtaccatttatagatagtttggatgctatcaatgcatgtttatattaccatgctgctgtatctggtttctctcactgctcagaatctcatttatgagaaaccatatgtcagtggtaaagtcaaggaaattgttcaacagatctcatttatttaagtcattaagcaatagtttgcagcactttaacagctttttggttatttttacattttaagtggataacatatggtatatagccagactgtacagacatgtttaaaaaaacacactgcttaacctattaaatatgtgtttagaattttataagcaaatataaatactgtaaaaagtcactttattttatttttcagcattatgtacataaatatgaagaggaaattatcttcaggttgatatcacaatcacttttcttactttctgtccatagtactttttcatgaaagaaatttgctaaataagacatgaaaacaagactgggtagttgtagatttctgctttttaaattacatttgctaattttagattatttcacaattttaaggagcaaaataggttcacgattcatatccaaattatgctttgcaattggaaaagggtttaaaattttatttatatttctggtagtacctgtactaactgaattgaaggtagtgcttatgttatttttgttctttttttctgacttcggtttatgttttcatttctttggagtaatgctgctctagattgttctaaatagaatgtgggcttcataatttttttttccacaaaaacagagtagtcaacttatatagtcaattacatcaggacattttgtgtttcttacagaagcaaaccataggctcctcttttccttaaaactacttagataaactgtattcgtgaactgcatgctggaaaatgctactattatgctaaataatgctaaccaacatttaaaatgtgcaaaactaataaagattacattttttatttt

SEQ ID NO: 7 - DNA, 8381 bp, Homo sapiens
atactgcagaggtctctggtgcatgtgtgtatgtgtgcgtttgtgtgtgtttgtgtgtctgtgtgttctgccccagtgagactgcagcccttgtaaatactttgacaccttttgcaagaaggaatctgaacaattgcaactgaaggcacattgttatcatctcgtctttgggtgatgctgttcctcactgcagatggataattttccttttaatcaggaatttcatatgcagaataaatggtaattaaaatgtgcaggatgacaagatggagcaaacagtgcttgtaccaccaggacctgacagcttcaacttcttcaccagagaatctcttgcggctattgaaagacgcattgcagaagaaaaggcaaagaatcccaaaccagacaaaaaagatgacgacgaaaatggcccaaagccaaatagtgacttggaagctggaaagaaccttccatttatttatggagacattcctccagagatggtgtcagagcccctggaggacctggacccctactatatcaataagaaaacttttatagtattgaataaattgaaggccatcttccggttcagtgccacctctgccctgtacattttaactcccttcaatcctcttaggaaaatagctattaagattttggtacattcattattcagcatgctaattatgtgcactattttgacaaactgtgtgtttatgacaatgagtaaccctcctgattggacaaagaatgtagaatacaccttcacaggaatatatacttttgaatcacttataaaaattattgcaaggggattctgtttagaagattttactttccttcgggatccatggaactggctcgatttcactgtcattacatttgcgtacgtcacagagtttgtggacctgggcaatgtctcggcattgagaacattcagagttctccgagcattgaagacgatttcagtcattccaggcctgaaaaccattgtgggagccctgatccagtctgtgaagaagctctcagatgtaatgatcctgactgtgttctgtctgagcgtatttgctctaattgggctgcagctgttcatgggcaacctgaggaataaatgtatacaatggcctcccaccaatgcttccttggaggaacatagtatagaaaagaatataactgtgaattataatggtacacttataaatgaaactgtctttgagtttgactggaagtcatatattcaagattcaagatatcattatttcctggagggttttttagatgcactactatgtggaaatagctctgatgcaggccaatgtccagagggatatatgtgtgtgaaagctggtagaaatcccaattatggctacacaagctttgataccttcagttgggcttttttgtccttgtttcgactaatgactcaggacttctgggaaaatctttatcaactgacattacgtgctgctgggaaaacgtacatgatattttttgtattggtcattttcttgggctcattctacctaataaatttgatcctggctgtggtggccatggcctacgaggaacagaatcaggccaccttggaagaagcagaacagaaagaggccgaatttcagcagatgattgaacagcttaaaaagcaacaggaggcagctcagcaggcagcaacggcaactgcctcagaacattccagagagcccagtgcagcaggcaggctctcagacagctcatctgaagcctctaagttgagttccaagagtgctaaggaaagaagaaatcggaggaagaaaagaaaacagaaagagcagtctggtggggaagagaaagatgaggatgaattccaaaaatctgaatctgaggacagcatcaggaggaaaggttttcgcttctccattgaagggaaccgattgacatatgaaaagaggtactcctccccacaccagtctttgttgagcatccgtggctccctattttcaccaaggcgaaatagcagaacaagccttttcagctttagagggcgagcaaaggatgtgggatctgagaacgacttcgcagatgatgagcacagcacctttgaggataacgagagccgtagagattccttgtttgtgccccgacgacacggagagagacgcaacagcaacctgagtcagaccagtaggtcatcccggatgctggcagtgtttccagcgaatgggaagatgcacagcactgtggattgcaatggtgtggtttccttggttggtggaccttcagttcctacatcgcctgttggacagcttctgccagaggtgataatagataagccagctactgatgacaatggaacaaccactgaaactgaaatgagaaagagaaggtcaagttctttccacgtttccatggactttctagaagatccttcccaaaggcaacgagcaatgagtatagccagcattctaacaaatacagtagaagaacttgaagaatccaggcagaaatgcccaccctgttggtataaattttccaacatattcttaatctgggactgttctccatattggttaaaagtgaaacatgttgtcaacctggttgtgatggacccatttgttgacctggccatcaccatctgtattgtcttaaatactcttttcatggccatggagcactatccaatgacggaccatttcaataatgtgcttacagtaggaaacttggttttcactgggatctttacagcagaaatgtttctgaaaattattgccatggatccttactattatttccaagaaggctggaatatctttgacggttttattgtgacgcttagcctggtagaacttggactcgccaatgtggaaggattatctgttctccgttcatttcgattgctgcgagttttcaagttggcaaaatcttggccaacgttaaatatgctaataaagatcatcggcaattccgtgggggctctgggaaatttaaccctcgtcttggccatcatcgtcttcatttttgccgtggtcggcatgcagctctttggtaaaagctacaaagattgtgtctgcaagatcgccagtgattgtcaactcccacgctggcacatgaatgacttcttccactccttcctgattgtgctccgcgtgctgtgtggggagtggatagagaccatgtgggactgtatggaggttgctggtcaagccatgtgccttactgtcttcatgatggtcatggtgattggaaacctagtggtcctgaatctctttctggccttgcttctgagctcatttagtgcagacaaccttgcagccactgatgatgataatgaaatgaataatctccaaattgctgtggataggatgcacaaaggagtagcttatgtgaaaagaaaaatatatgaatttattcaacagtccttcattaggaaacaaaagattttagatgaaattaaaccacttgatgatctaaacaacaagaaagacagttgtatgtccaatcatacaacagaaattgggaaagatcttgactatcttaaagatgtaaatggaactacaagtggtataggaactggcagcagtgttgaaaaatacattattgatgaaagtgattacatgtcattcataaacaaccccagtcttactgtgactgtaccaattgctgtaggagaatctgactttgaaaatttaaacacggaagactttagtagtgaatcggatctggaagaaagcaaagagaaactgaatgaaagcagtagctcatcagaaggtagcactgtggacatcggcgcacctgtagaagaacagcccgtagtggaacctgaagaaactcttgaaccagaagcttgtttcactgaaggctgtgtacaaagattcaagtgttgtcaaatcaatgtggaagaaggcagaggaaaacaatggtggaacctgagaaggacgtgtttccgaatagttgaacataactggtttgagaccttcattgttttcatgattctccttagtagtggtgctctggcatttgaagatatatatattgatcagcgaaagacgattaagacgatgttggaatatgctgacaaggttttcacttacattttcattctggaaatgcttctaaaatgggtggcatatggctatcaaacatatttcaccaatgcctggtgttggctggacttcttaattgttgatgtttcattggtcagtttaacagcaaatgccttgggttactcagaacttggagccatcaaatctctcaggacactaagagctctgagacctctaagagccttatctcgatttgaagggatgagggtggttgtgaatgcccttttaggagcaattccatccatcatgaatgtgcttctggtttgtcttatattctggctaattttcagcatcatgggcgtaaatttgtttgctggcaaattctaccactgtattaacaccacaactggtgacaggtttgacatcgaagacgtgaataatcatactgattgcctaaaactaatagaaagaaatgagactgctcgatggaaaaatgtgaaagtaaactttgataatgtaggatttgggtatctctctttgcttcaagttgccacattcaaaggatggatggatataatgtatgcagcagttgattccagaaatgtggaactccagcctaagtatgaaaaaagtctgtacatgtatctttactttgttattttcatcatctttgggtccttcttcaccttgaacctgtttattggtgtcatcatagataatttcaaccagcagaaaaagaagtttggaggtcaagacatctttatgacagaagaacagaagaaatactataatgcaatgaaaaaattaggatcgaaaaaaccgcaaaagcctatacctcgaccaggaaacaaatttcaaggaatggtctttgacttcgtaaccagacaagtttttgacataagcatcatgattctcatctgtcttaacatggtcacaatgatggtggaaacagatgaccagagtgaatatgtgactaccattttgtcacgcatcaatctggtgttcattgtgctatttactggagagtgtgtactgaaactcatctctctacgccattattattttaccattggatggaatatttttgattttgtggttgtcattctctccattgtaggtatgtttcttgccgagctgatagaaaagtatttcgtgtcccctaccctgttccgagtgatccgtcttgctaggattggccgaatcctacgtctgatcaaaggagcaaaggggatccgcacgctgctctttgctttgatgatgtcccttcctgcgttgtttaacatcggcctcctactcttcctagtcatgttcatctacgccatctttgggatgtccaactttgcctatgttaagagggaagttgggatcgatgacatgttcaactttgagacctttggcaacagcatgatctgcctattccaaattacaacctctgctggctgggatggattgctagcacccattctcaacagtaagccacccgactgtgaccctaataaagttaaccctggaagctcagttaagggagactgtgggaacccatctgttggaattttcttttttgtcagttacatcatcatatccttcctggttgtggtgaacatgtacatcgcggtcatcctggagaacttcagtgttgctactgaagaaagtgcagagcctctgagtgaggatgactttgagatgttctatgaggtttgggagaagtttgatcccgatgcaactcagttcatggaatttgaaaaattatctcagtttgcagctgcgcttgaaccgcctctcaatctgccacaaccaaacaaactccagctcattgccatggatttgcccatggtgagtggtgaccggatccactgtcttgatatcttatttgcttttacaaagcgggttctaggagagagtggagagatggatgctctacgaatacagatggaagagcgattcatggcttccaatccttccaaggtctcctatcagccaatcactactactttaaaacgaaaacaagaggaagtatctgctgtcattattcagcgtgcttacagacgccaccttttaaagcgaactgtaaaacaagcttcctttacgtacaataaaaacaaaatcaaaggtggggctaatcttcttataaaagaagacatgataattgacagaataaatgaaaactctattacagaaaaaactgatctgaccatgtccactgcagcttgtccaccttcctatgaccgggtgacaaagccaattgtggaaaaacatgagcaagaaggcaaagatgaaaaagccaaagggaaataaatgaaaataaataaaaataattgggtgacaaattgtttacagcctgtgaaggtgatgtatttttatcaacaggactcctttaggaggtcaatgccaaactgactgtttttacacaaatctccttaaggtcagtgcctacaataagacagtgaccccttgtcagcaaactgtgactctgtgtaaaggggagatgaccttgacaggaggttactgttctcactaccagctgacactgctgaagataagatgcacaatggctagtcagactgtagggaccagtttcaaggggtgcaaacctgtgattttggggttgtttaacatgaaacactttagtgtagtaattgtatccactgtttgcatttcaactgccacatttgtcacatttttatggaatctgttagtggattcatctttttgttaatccatgtgtttattatatgtgactatttttgtaaacgaagtttctgttgagaaataggctaaggacctctataacaggtatgccacctggggggtatggcaaccacatggccctcccagctacacaaagtcgtggtttgcatgagggcatgctgcacttagagatcatgcatgagaaaaagtcacaagaaaaacaaattcttaaatttcaccatatttctgggaggggtaattgggtgataagtggaggtgctttgttgatcttgttttgcgaaatccagcccctagaccaagtagattatttgtgggtaggccagtaaatcttagcaggtgcaaacttcattcaaatgtttggagtcataaatgttatgtttctttttgttgtattaaaaaaaaaacctgaatagtgaatattgcccctcaccctccaccgccagaagactgaattgaccaaaattactctttataaatttctgctttttcctgcactttgtttagccatctttgggctctcagcaaggttgacactgtatatgttaatgaaatgctatttattatgtaaatagtcattttaccctgtggtgcacgtttgagcaaacaaataatgacctaagcacagtatttattgcatcaaatatgtaccacaagaaatgtagagtgcaagctttacacaggtaataaaatgtattctgtaccatttatagatagtttggatgctatcaatgcatgtttatattaccatgctgctgtatctggtttctctcactgctcagaatctcatttatgagaaaccatatgtcagtggtaaagtcaaggaaattgttcaacagatctcatttatttaagtcattaagcaatagtttgcagcactttaacagctttttggttatttttacattttaagtggataacatatggtatatagccagactgtacagacatgtttaaaaaaacacactgcttaacctattaaatatgtgtttagaattttataagcaaatataaatactgtaaaaagtcactttattttatttttcagcattatgtacataaatatgaagaggaaattatcttcaggttgatatcacaatcacttttcttactttctgtccatagtactttttcatgaaagaaatttgctaaataagacatgaaaacaagactgggtagttgtagatttctgctttttaaattacatttgctaattttagattatttcacaattttaaggagcaaaataggttcacgattcatatccaaattatgctttgcaattggaaaagggtttaaaattttatttatatttctggtagtacctgtactaactgaattgaaggtagtgcttatgttatttttgttctttttttctgacttcggtttatgttttcatttctttggagtaatgctgctctagattgttctaaatagaatgtgggcttcataatttttttttccacaaaaacagagtagtcaacttatatagtcaattacatcaggacattttgtgtttcttacagaagcaaaccataggctcctcttttccttaaaactacttagataaactgtattcgtgaactgcatgctggaaaatgctactattatgctaaataatgctaaccaacatttaaaatgtgcaaaactaataaagattacattttttatttt

SEQ ID NO: 8 - DNA, 8381 bp, Homo sapiens
atactgcagaggtctctggtgcatgtgtgtatgtgtgcgtttgtgtgtgtttgtgtgtctgtgtgttctgccccagtgagactgcagcccttgtaaatactttgacaccttttgcaagaaggaatctgaacaattgcaactgaaggcacattgttatcatctcgtctttgggtgatgctgttcctcactgcagatggataattttccttttaatcaggaatttcatatgcagaataaatggtaattaaaatgtgcaggatgacaagatggagcaaacagtgcttgtaccaccaggacctgacagcttcaacttcttcaccagagaatctcttgcggctattgaaagacgcattgcagaagaaaaggcaaagaatcccaaaccagacaaaaaagatgacgacgaaaatggcccaaagccaaatagtgacttggaagctggaaagaaccttccatttatttatggagacattcctccagagatggtgtcagagcccctggaggacctggacccctactatatcaataagaaaacttttatagtattgaataaattgaaggccatcttccggttcagtgccacctctgccctgtacattttaactcccttcaatcctcttaggaaaatagctattaagattttggtacattcattattcagcatgctaattatgtgcactattttgacaaactgtgtgtttatgacaatgagtaaccctcctgattggacaaagaatgtagaatacaccttcacaggaatatatacttttgaatcacttataaaaattattgcaaggggattctgtttagaagattttactttccttcgggatccatggaactggctcgatttcactgtcattacatttgcgtacgtcacagagtttgtggacctgggcaatgtctcggcattgagaacattcagagttctccgagcattgaagacgatttcagtcattccaggcctgaaaaccattgtgggagccctgatccagtctgtgaagaagctctcagatgtaatgatcctgactgtgttctgtctgagcgtatttgctctaattgggctgcagctgttcatgggcaacctgaggaataaatgtatacaatggcctcccaccaatgcttccttggaggaacatagtatagaaaagaatataactgtgaattataatggtacacttataaatgaaactgtctttgagtttgactggaagtcatatattcaagattcaagatatcattatttcctggagggttttttagatgcactactatgtggaaatagctctgatgcaggccaatgtccagagggatatatgtgtgtgaaagctggtagaaatcccaattatggctacacaagctttgataccttcagttgggcttttttgtccttgtttcgactaatgactcaggacttctgggaaaatctttatcaactgacattacgtgctgctgggaaaacgtacatgatattttttgtattggtcattttcttgggctcattctacctaataaatttgatcctggctgtggtggccatggcctacgaggaacagaatcaggccaccttggaagaagcagaacagaaagaggccgaatttcagcagatgattgaacagcttaaaaagcaacaggaggcagctcagcaggcagcaacggcaactgcctcagaacattccagagagcccagtgcagcaggcaggctctcagacagctcatctgaagcctctaagttgagttccaagagtgctaaggaaagaagaaatcggaggaagaaaagaaaacagaaagagcagtctggtggggaagagaaagatgaggatgaattccaaaaatctgaatctgaggacagcatcaggaggaaaggttttcgcttctccattgaagggaaccgattgacatatgaaaagaggtactcctccccacaccagtctttgttgagcatccgtggctccctattttcaccaaggcgaaatagcagaacaagccttttcagctttagagggcgagcaaaggatgtgggatctgagaacgacttcgcagatgatgagcacagcacctttgaggataacgagagccgtagagattccttgtttgtgccccgacgacacggagagagacgcaacagcaacctgagtcagaccagtaggtcatcccggatgctggcagtgtttccagcgaatgggaagatgcacagcactgtggattgcaatggtgtggtttccttggttggtggaccttcagttcctacatcgcctgttggacagcttctgccagaggtgataatagataagccagctactgatgacaatggaacaaccactgaaactgaaatgagaaagagaaggtcaagttctttccacgtttccatggactttctagaagatccttcccaaaggcaacgagcaatgagtatagccagcattctaacaaatacagtagaagaacttgaagaatccaggcagaaatgcccaccctgttggtataaattttccaacatattcttaatctgggactgttctccatattggttaaaagtgaaacatgttgtcaacctggttgtgatggacccatttgttgacctggccatcaccatctgtattgtcttaaatactcttttcatggccatggagcactatccaatgacggaccatttcaataatgtgcttacagtaggaaacttggttttcactgggatctttacagcagaaatgtttctgaaaattattgccatggatccttactattatttccaagaaggctggaatatctttgacggttttattgtgacgcttagcctggtagaacttggactcgccaatgtggaaggattatctgttctccgttcatttcgattgctgcgagttttcaagttggcaaaatcttggccaacgttaaatatgctaataaagatcatcggcaattccgtgggggctctgggaaatttaaccctcgtcttggccatcatcgtcttcatttttgccgtggtcggcatgcagctctttggtaaaagctacaaagattgtgtctgcaagatcgccagtgattgtcaactcccacgctggcacatgaatgacttcttccactccttcctgattgtgttccgcgtgctgtgtgaggagtggatagagaccatgtgggactgtatggaggttgctggtcaagccatgtgccttactgtcttcatgatggtcatggtgattggaaacctagtggtcctgaatctctttctggccttgcttctgagctcatttagtgcagacaaccttgcagccactgatgatgataatgaaatgaataatctccaaattgctgtggataggatgcacaaaggagtagcttatgtgaaaagaaaaatatatgaatttattcaacagtccttcattaggaaacaaaagattttagatgaaattaaaccacttgatgatctaaacaacaagaaagacagttgtatgtccaatcatacaacagaaattgggaaagatcttgactatcttaaagatgtaaatggaactacaagtggtataggaactggcagcagtgttgaaaaatacattattgatgaaagtgattacatgtcattcataaacaaccccagtcttactgtgactgtaccaattgctgtaggagaatctgactttgaaaatttaaacacggaagactttagtagtgaatcggatctggaagaaagcaaagagaaactgaatgaaagcagtagctcatcagaaggtagcactgtggacatcggcgcacctgtagaagaacagcccgtagtggaacctgaagaaactcttgaaccagaagcttgtttcactgaaggctgtgtacaaagattcaagtgttgtcaaatcaatgtggaagaaggcagaggaaaacaatggtggaacctgagaaggacgtgtttccgaatagttgaacataactggtttgagaccttcattgttttcatgattctccttagtagtggtgctctggcatttgaagatatatatattgatcagcgaaagacgattaagacgatgttggaatatgctgacaaggttttcacttacattttcattctggaaatgcttctaaaatgggtggcatatggctatcaaacatatttcaccaatgcctggtgttggctggacttcttaattgttgatgtttcattggtcagtttaacagcaaatgccttgggttactcagaacttggagccatcaaatctctcaggacactaagagctctgagacctctaagagccttatctcgatttgaagggatgagggtggttgtgaatgcccttttaggagcaattccatccatcatgaatgtgcttctggtttgtcttatattctggctaattttcagcatcatgggcgtaaatttgtttgctggcaaattctaccactgtattaacaccacaactggtgacaggtttgacatcgaagacgtgaataatcatactgattgcctaaaactaatagaaagaaatgagactgctcgatggaaaaatgtgaaagtaaactttgataatgtaggatttgggtatctctctttgcttcaagttgccacattcaaaggatggatggatataatgtatgcagcagttgattccagaaatgtggaactccagcctaagtatgaaaaaagtctgtacatgtatctttactttgttattttcatcatctttgggtccttcttcaccttgaacctgtttattggtgtcatcatagataatttcaaccagcagaaaaagaagtttggaggtcaagacatctttatgacagaagaacagaagaaatactataatgcaatgaaaaaattaggatcgaaaaaaccgcaaaagcctatacctcgaccaggaaacaaatttcaaggaatggtctttgacttcgtaaccagacaagtttttgacataagcatcatgattctcatctgtcttaacatggtcacaatgatggtggaaacagatgaccagagtgaatatgtgactaccattttgtcacgcatcaatctggtgttcattgtgctatttactggagagtgtgtactgaaactcatctctctacgccattattattttaccattggatggaatatttttgattttgtggttgtcattctctccattgtaggtatgtttcttgccgagctgatagaaaagtatttcgtgtcccctaccctgttccgagtgatccgtcttgctaggattggccgaatcctacgtctgatcaaaggagcaaaggggatccgcacgctgctctttgctttgatgatgtcccttcctgcgttgtttaacatcggcctcctactcttcctagtcatgttcatctacgccatctttgggatgtccaactttgcctatgttaagagggaagttgggatcgatgacatgttcaactttgagacctttggcaacagcatgatctgcctattccaaattacaacctctgctggctgggatggattgctagcacccattctcaacagtaagccacccgactgtgaccctaataaagttaaccctggaagctcagttaagggagactgtgggaacccatctgttggaattttcttttttgtcagttacatcatcatatccttcctggttgtggtgaacatgtacatcgcggtcatcctggagaacttcagtgttgctactgaagaaagtgcagagcctctgagtgaggatgactttgagatgttctatgaggtttgggagaagtttgatcccgatgcaactcagttcatggaatttgaaaaattatctcagtttgcagctgcgcttgaaccgcctctcaatctgccacaaccaaacaaactccagctcattgccatggatttgcccatggtgagtggtgaccggatccactgtcttgatatcttatttgcttttacaaagcgggttctaggagagagtggagagatggatgctctacgaatacagatggaagagcgattcatggcttccaatccttccaaggtctcctatcagccaatcactactactttaaaacgaaaacaagaggaagtatctgctgtcattattcagcgtgcttacagacgccaccttttaaagcgaactgtaaaacaagcttcctttacgtacaataaaaacaaaatcaaaggtggggctaatcttcttataaaagaagacatgataattgacagaataaatgaaaactctattacagaaaaaactgatctgaccatgtccactgcagcttgtccaccttcctatgaccgggtgacaaagccaattgtggaaaaacatgagcaagaaggcaaagatgaaaaagccaaagggaaataaatgaaaataaataaaaataattgggtgacaaattgtttacagcctgtgaaggtgatgtatttttatcaacaggactcctttaggaggtcaatgccaaactgactgtttttacacaaatctccttaaggtcagtgcctacaataagacagtgaccccttgtcagcaaactgtgactctgtgtaaaggggagatgaccttgacaggaggttactgttctcactaccagctgacactgctgaagataagatgcacaatggctagtcagactgtagggaccagtttcaaggggtgcaaacctgtgattttggggttgtttaacatgaaacactttagtgtagtaattgtatccactgtttgcatttcaactgccacatttgtcacatttttatggaatctgttagtggattcatctttttgttaatccatgtgtttattatatgtgactatttttgtaaacgaagtttctgttgagaaataggctaaggacctctataacaggtatgccacctggggggtatggcaaccacatggccctcccagctacacaaagtcgtggtttgcatgagggcatgctgcacttagagatcatgcatgagaaaaagtcacaagaaaaacaaattcttaaatttcaccatatttctgggaggggtaattgggtgataagtggaggtgctttgttgatcttgttttgcgaaatccagcccctagaccaagtagattatttgtgggtaggccagtaaatcttagcaggtgcaaacttcattcaaatgtttggagtcataaatgttatgtttctttttgttgtattaaaaaaaaaacctgaatagtgaatattgcccctcaccctccaccgccagaagactgaattgaccaaaattactctttataaatttctgctttttcctgcactttgtttagccatctttgggctctcagcaaggttgacactgtatatgttaatgaaatgctatttattatgtaaatagtcattttaccctgtggtgcacgtttgagcaaacaaataatgacctaagcacagtatttattgcatcaaatatgtaccacaagaaatgtagagtgcaagctttacacaggtaataaaatgtattctgtaccatttatagatagtttggatgctatcaatgcatgtttatattaccatgctgctgtatctggtttctctcactgctcagaatctcatttatgagaaaccatatgtcagtggtaaagtcaaggaaattgttcaacagatctcatttatttaagtcattaagcaatagtttgcagcactttaacagctttttggttatttttacattttaagtggataacatatggtatatagccagactgtacagacatgtttaaaaaaacacactgcttaacctattaaatatgtgtttagaattttataagcaaatataaatactgtaaaaagtcactttattttatttttcagcattatgtacataaatatgaagaggaaattatcttcaggttgatatcacaatcacttttcttactttctgtccatagtactttttcatgaaagaaatttgctaaataagacatgaaaacaagactgggtagttgtagatttctgctttttaaattacatttgctaattttagattatttcacaattttaaggagcaaaataggttcacgattcatatccaaattatgctttgcaattggaaaagggtttaaaattttatttatatttctggtagtacctgtactaactgaattgaaggtagtgcttatgttatttttgttctttttttctgacttcggtttatgttttcatttctttggagtaatgctgctctagattgttctaaatagaatgtgggcttcataatttttttttccacaaaaacagagtagtcaacttatatagtcaattacatcaggacattttgtgtttcttacagaagcaaaccataggctcctcttttccttaaaactacttagataaactgtattcgtgaactgcatgctggaaaatgctactattatgctaaataatgctaaccaacatttaaaatgtgcaaaactaataaagattacattttttatttt

SEQ ID NO: 9 - DNA, 8381 bp, Homo sapiens
atactgcagaggtctctggtgcatgtgtgtatgtgtgcgtttgtgtgtgtttgtgtgtctgtgtgttctgccccagtgagactgcagcccttgtaaatactttgacaccttttgcaagaaggaatctgaacaattgcaactgaaggcacattgttatcatctcgtctttgggtgatgctgttcctcactgcagatggataattttccttttaatcaggaatttcatatgcagaataaatggtaattaaaatgtgcaggatgacaagatggagcaaacagtgcttgtaccaccaggacctgacagcttcaacttcttcaccagagaatctcttgcggctattgaaagacgcattgcagaagaaaaggcaaagaatcccaaaccagacaaaaaagatgacgacgaaaatggcccaaagccaaatagtgacttggaagctggaaagaaccttccatttatttatggagacattcctccagagatggtgtcagagcccctggaggacctggacccctactatatcaataagaaaacttttatagtattgaataaattgaaggccatcttccggttcagtgccacctctgccctgtacattttaactcccttcaatcctcttaggaaaatagctattaagattttggtacattcattattcagcatgctaattatgtgcactattttgacaaactgtgtgtttatgacaatgagtaaccctcctgattggacaaagaatgtagaatacaccttcacaggaatatatacttttgaatcacttataaaaattattgcaaggggattctgtttagaagattttactttccttcgggatccatggaactggctcgatttcactgtcattacatttgcgtacgtcacagagtttgtggacctgggcaatgtctcggcattgagaacattcagagttctccgagcattgaagacgatttcagtcattccaggcctgaaaaccattgtgggagccctgatccagtctgtgaagaagctctcagatgtaatgatcctgactgtgttctgtctgagcgtatttgctctaattgggctgcagctgttcatgggcaacctgaggaataaatgtatacaatggcctcccaccaatgcttccttggaggaacatagtatagaaaagaatataactgtgaattataatggtacacttataaatgaaactgtctttgagtttgactggaagtcatatattcaagattcaagatatcattatttcctggagggttttttagatgcactactatgtggaaatagctctgatgcaggccaatgtccagagggatatatgtgtgtgaaagctggtagaaatcccaattatggctacacaagctttgataccttcagttgggcttttttgtccttgtttcgactaatgactcaggacttctgggaaaatctttatcaactgacattacgtgctgctgggaaaacgtacatgatattttttgtattggtcattttcttgggctcattctacctaataaatttgatcctggctgtggtggccatggcctacgaggaacagaatcaggccaccttggaagaagcagaacagaaagaggccgaatttcagcagatgattgaacagcttaaaaagcaacaggaggcagctcagcaggcagcaacggcaactgcctcagaacattccagagagcccagtgcagcaggcaggctctcagacagctcatctgaagcctctaagttgagttccaagagtgctaaggaaagaagaaatcggaggaagaaaagaaaacagaaagagcagtctggtggggaagagaaagatgaggatgaattccaaaaatctgaatctgaggacagcatcaggaggaaaggttttcgcttctccattgaagggaaccgattgacatatgaaaagaggtactcctccccacaccagtctttgttgagcatccgtggctccctattttcaccaaggcgaaatagcagaacaagccttttcagctttagagggcgagcaaaggatgtgggatctgagaacgacttcgcagatgatgagcacagcacctttgaggataacgagagccgtagagattccttgtttgtgccccgacgacacggagagagacgcaacagcaacctgagtcagaccagtaggtcatcccggatgctggcagtgtttccagcgaatgggaagatgcacagcactgtggattgcaatggtgtggtttccttggttggtggaccttcagttcctacatcgcctgttggacagcttctgccagaggtgataatagataagccagctactgatgacaatggaacaaccactgaaactgaaatgagaaagagaaggtcaagttctttccacgtttccatggactttctagaagatccttcccaaaggcaacgagcaatgagtatagccagcattctaacaaatacagtagaagaacttgaagaatccaggcagaaatgcccaccctgttggtataaattttccaacatattcttaatctgggactgttctccatattggttaaaagtgaaacatgttgtcaacctggttgtgatggacccatttgttgacctggccatcaccatctgtattgtcttaaatactcttttcatggccatggagcactatccaatgacggaccatttcaataatgtgcttacagtaggaaacttggttttcactgggatctttacagcagaaatgtttctgaaaattattgccatggatccttactattatttccaagaaggctggaatatctttgacggttttattgtgacgcttagcctggtagaacttggactcgccaatgtggaaggattatctgttctccgttcatttcgattgctgcgagttttcaagttggcaaaatcttggccaacgttaaatatgctaataaagatcatcggcaattccgtgggggctctgggaaatttaaccctcgtcttggccatcatcgtcttcatttttgccgtggtcggcatgcagctctttggtaaaagctacaaagattgtgtctgcaagatcgccagtgattgtcaactcccacgctggcacatgaatgacttcttccactccttcctgattgtgttccgcgtgctgtgtggggagtggatagagaccatgtgggactgtatggaggttgctggtcaagccatgtgccttactgtcttcatgatggtcatggtgattggaaacctagtggtcctgaatctctttctggccttgcttctgagctcatttagtgcagacaaccttgcagccactgatgatgataatgaaatgaataatctccaaattgctgtggataggatgcacaaaggagtagcttatgtgaaaagaaaaatatatgaatttattcaacagtccttcattaggaaacaaaagattttagatgaaattaaaccacttgatgatctaaacaacaagaaagacagttgtatgtccaatcatacaacagaaattgggaaagatcttgactatcttaaagatgtaaatggaactacaagtggtataggaactggcagcagtgttgaaaaatacattattgatgaaagtgattacatgtcattcataaacaaccccagtcttactgtgactgtaccaattgctgtaggagaatctgactttgaaaatttaaacacggaagactttagtagtgaatcggatctggaagaaagcaaagagaaactgaatgaaagcagtagctcatcagaaggtagcactgtggacatcggcgcacctgtagaagaacagcccgtagtggaacctgaagaaactcttgaaccagaagcttgtttcactgaaggctgtgtacaaagattcaagtgttgtcaaatcaatgtggaagaaggcagaggaaaacaatggtggaacctgagaaggacgtgtttccgaatagttgaacataactggtttgagaccttcattgttttcatgattctccttagtagtggtgctctggcatttgaagatatatatattgatcagcgaaagacgattaagacgatgttggaatatgctgacaaggttttcacttacattttcattctggaaatgcttctaaaatgggtggcatatggctatcaaacatatttcaccaatgcctggtgttggctggacttcttaattgttgatgtttcattggtcagtttaacagcaaatgccttgggttactcagaacttggagccatcaaatctctcaggacactaagagctctgagacctctaagagccttatctcgatttgaagggatgagggtggttgtgaatgcccttttaggagcaattccatccatcatgaatgtgcttctggtttgtcttatattctggctaattttcagcatcatgggcgtaaatttgtttgctggcaaattctaccactgtattaacaccacaactggtgacaggtttgacatcgaagacgtgaataatcatactgattgcctaaaactaatagaaagaaatgagactgctcgatggaaaaatgtgaaagtaaactttgataatgtaggatttgggtatctctctttgcttcaagttgccacattcaaaggatggatggatataatgtatgcagcagttgattccagaaatgtggaactccagcctaagtatgaaaaaagtctgtacatgtatctttactttgttattttcatcatctttgggtccttcttcaccttgaacctgtttattggtgtcatcatagataatttcaaccagcagaaaaagaagtttggaggtcaagacatctttatgacagaagaacagaagaaatactataatgcaatgaaaaaattaggatcgaaaaaaccgcaaaagcctatacctcgaccaggaaacaaatttcaaggaatggtctttgacttcgtaaccagacaagtttttgacataagcatcatgattctcatctgtcttaacatggtcacaatgatggtggaaacagatgaccagagtgaatatgtgactaccattttgtcacgcatcaatctggtgttcattgtgctatttactggagagtgtgtactgaaactcatctctctacgccattattattttaccattggatggaatatttttgattttgtggttgtcattctctccattgtaggtatgtttcttgccgagctgatagaaaagtatttcgtgtcccctaccctgttccgagtgatccgtcttgctaggattggccgaatcctacgtctgatcaaaggagcaaaggggatccgcacgctgctctttgctttgatgatgtcccttcctgcgttgtttaacatcggcctcctactcttcctagtcatgttcatctacgccatctttgggatgtccaactttgcctatgttaagagggaagttgggatcgatgacatgttcaactttgagacctttggcaacagcatgatctgcctattccaaattagaacctctgctggctgggatggattgctagcacccattctcaacagtaagccacccgactgtgaccctaataaagttaaccctggaagctcagttaagggagactgtgggaacccatctgttggaattttcttttttgtcagttacatcatcatatccttcctggttgtggtgaacatgtacatcgcggtcatcctggagaacttcagtgttgctactgaagaaagtgcagagcctctgagtgaggatgactttgagatgttctatgaggtttgggagaagtttgatcccgatgcaactcagttcatggaatttgaaaaattatctcagtttgcagctgcgcttgaaccgcctctcaatctgccacaaccaaacaaactccagctcattgccatggatttgcccatggtgagtggtgaccggatccactgtcttgatatcttatttgcttttacaaagcgggttctaggagagagtggagagatggatgctctacgaatacagatggaagagcgattcatggcttccaatccttccaaggtctcctatcagccaatcactactactttaaaacgaaaacaagaggaagtatctgctgtcattattcagcgtgcttacagacgccaccttttaaagcgaactgtaaaacaagcttcctttacgtacaataaaaacaaaatcaaaggtggggctaatcttcttataaaagaagacatgataattgacagaataaatgaaaactctattacagaaaaaactgatctgaccatgtccactgcagcttgtccaccttcctatgaccgggtgacaaagccaattgtggaaaaacatgagcaagaaggcaaagatgaaaaagccaaagggaaataaatgaaaataaataaaaataattgggtgacaaattgtttacagcctgtgaaggtgatgtatttttatcaacaggactcctttaggaggtcaatgccaaactgactgtttttacacaaatctccttaaggtcagtgcctacaataagacagtgaccccttgtcagcaaactgtgactctgtgtaaaggggagatgaccttgacaggaggttactgttctcactaccagctgacactgctgaagataagatgcacaatggctagtcagactgtagggaccagtttcaaggggtgcaaacctgtgattttggggttgtttaacatgaaacactttagtgtagtaattgtatccactgtttgcatttcaactgccacatttgtcacatttttatggaatctgttagtggattcatctttttgttaatccatgtgtttattatatgtgactatttttgtaaacgaagtttctgttgagaaataggctaaggacctctataacaggtatgccacctggggggtatggcaaccacatggccctcccagctacacaaagtcgtggtttgcatgagggcatgctgcacttagagatcatgcatgagaaaaagtcacaagaaaaacaaattcttaaatttcaccatatttctgggaggggtaattgggtgataagtggaggtgctttgttgatcttgttttgcgaaatccagcccctagaccaagtagattatttgtgggtaggccagtaaatcttagcaggtgcaaacttcattcaaatgtttggagtcataaatgttatgtttctttttgttgtattaaaaaaaaaacctgaatagtgaatattgcccctcaccctccaccgccagaagactgaattgaccaaaattactctttataaatttctgctttttcctgcactttgtttagccatctttgggctctcagcaaggttgacactgtatatgttaatgaaatgctatttattatgtaaatagtcattttaccctgtggtgcacgtttgagcaaacaaataatgacctaagcacagtatttattgcatcaaatatgtaccacaagaaatgtagagtgcaagctttacacaggtaataaaatgtattctgtaccatttatagatagtttggatgctatcaatgcatgtttatattaccatgctgctgtatctggtttctctcactgctcagaatctcatttatgagaaaccatatgtcagtggtaaagtcaaggaaattgttcaacagatctcatttatttaagtcattaagcaatagtttgcagcactttaacagctttttggttatttttacattttaagtggataacatatggtatatagccagactgtacagacatgtttaaaaaaacacactgcttaacctattaaatatgtgtttagaattttataagcaaatataaatactgtaaaaagtcactttattttatttttcagcattatgtacataaatatgaagaggaaattatcttcaggttgatatcacaatcacttttcttactttctgtccatagtactttttcatgaaagaaatttgctaaataagacatgaaaacaagactgggtagttgtagatttctgctttttaaattacatttgctaattttagattatttcacaattttaaggagcaaaataggttcacgattcatatccaaattatgctttgcaattggaaaagggtttaaaattttatttatatttctggtagtacctgtactaactgaattgaaggtagtgcttatgttatttttgttctttttttctgacttcggtttatgttttcatttctttggagtaatgctgctctagattgttctaaatagaatgtgggcttcataatttttttttccacaaaaacagagtagtcaacttatatagtcaattacatcaggacattttgtgtttcttacagaagcaaaccataggctcctcttttccttaaaactacttagataaactgtattcgtgaactgcatgctggaaaatgctactattatgctaaataatgctaaccaacatttaaaatgtgcaaaactaataaagattacattttttatttt

SEQ ID NO: 10 - DNA, 8381 bp, Homo sapiens
atactgcagaggtctctggtgcatgtgtgtatgtgtgcgtttgtgtgtgtttgtgtgtctgtgtgttctgccccagtgagactgcagcccttgtaaatactttgacaccttttgcaagaaggaatctgaacaattgcaactgaaggcacattgttatcatctcgtctttgggtgatgctgttcctcactgcagatggataattttccttttaatcaggaatttcatatgcagaataaatggtaattaaaatgtgcaggatgacaagatggagcaaacagtgcttgtaccaccaggacctgacagcttcaacttcttcaccagagaatctcttgcggctattgaaagacgcattgcagaagaaaaggcaaagaatcccaaaccagacaaaaaagatgacgacgaaaatggcccaaagccaaatagtgacttggaagctggaaagaaccttccatttatttatggagacattcctccagagatggtgtcagagcccctggaggacctggacccctactatatcaataagaaaacttttatagtattgaataaattgaaggccatcttccggttcagtgccacctctgccctgtacattttaactcccttcaatcctcttaggaaaatagctattaagattttggtacattcattattcagcatgctaattatgtgcactattttgacaaactgtgtgtttatgacaatgagtaaccctcctgattggacaaagaatgtagaatacaccttcacaggaatatatacttttgaatcacttataaaaattattgcaaggggattctgtttagaagattttactttccttcgggatccatggaactggctcgatttcactgtcattacatttgcgtacgtcacagagtttgtggacctgggcaatgtctcggcattgagaacattcagagttctccgagcattgaagacgatttcagtcattccaggcctgaaaaccattgtgggagccctgatccagtctgtgaagaagctctcagatgtaatgatcctgactgtgttctgtctgagcgtatttgctctaattgggctgcagctgttcatgggcaacctgaggaataaatgtatacaatggcctcccaccaatgcttccttggaggaacatagtatagaaaagaatataactgtgaattataatggtacacttataaatgaaactgtctttgagtttgactggaagtcatatattcaagattcaagatatcattatttcctggagggttttttagatgcactactatgtggaaatagctctgatgcaggccaatgtccagagggatatatgtgtgtgaaagctggtagaaatcccaattatggctacacaagctttgataccttcagttgggcttttttgtccttgtttcgactaatgactcaggacttctgggaaaatctttatcaactgacattacgtgctgctgggaaaacgtacatgatattttttgtattggtcattttcttgggctcattctacctaataaatttgatcctggctgtggtggccatggcctacgaggaacagaatcaggccaccttggaagaagcagaacagaaagaggccgaatttcagcagatgattgaacagcttaaaaagcaacaggaggcagctcagcaggcagcaacggcaactgcctcagaacattccagagagcccagtgcagcaggcaggctctcagacagctcatctgaagcctctaagttgagttccaagagtgctaaggaaagaagaaatcggaggaagaaaagaaaacagaaagagcagtctggtggggaagagaaagatgaggatgaattccaaaaatctgaatctgaggacagcatcaggaggaaaggttttcgcttctccattgaagggaaccgattgacatatgaaaagaggtactcctccccacaccagtctttgttgagcatccgtggctccctattttcaccaaggcgaaatagcagaacaagccttttcagctttagagggcgagcaaaggatgtgggatctgagaacgacttcgcagatgatgagcacagcacctttgaggataacgagagccgtagagattccttgtttgtgccccgacgacacggagagagacgcaacagcaacctgagtcagaccagtaggtcatcccggatgctggcagtgtttccagcgaatgggaagatgcacagcactgtggattgcaatggtgtggtttccttggttggtggaccttcagttcctacatcgcctgttggacagcttctgccagaggtgataatagataagccagctactgatgacaatggaacaaccactgaaactgaaatgagaaagagaaggtcaagttctttccacgtttccatggactttctagaagatccttcccaaaggcaacgagcaatgagtatagccagcattctaacaaatacagtagaagaacttgaagaatccaggcagaaatgcccaccctgttggtataaattttccaacatattcttaatctgggactgttctccatattggttaaaagtgaaacatgttgtcaacctggttgtgatggacccatttgttgacctggccatcaccatctgtattgtcttaaatactcttttcatggccatggagcactatccaatgacggaccatttcaataatgtgcttacagtaggaaacttggttttcactgggatctttacagcagaaatgtttctgaaaattattgccatggatccttactattatttccaagaaggctggaatatctttgacggttttattgtgacgcttagcctggtagaacttggactcgccaatgtggaaggattatctgttctccgttcatttcgattgctgcgagttttcaagttggcaaaatcttggccaacgttaaatatgctaataaagatcatcggcaattccgtgggggctctgggaaatttaaccctcgtcttggccatcatcgtcttcatttttgccgtggtcggcatgcagctctttggtaaaagctacaaagattgtgtctgcaagatcgccagtgattgtcaactcccacgctggcacatgaatgacttcttccactccttcctgattgtgttccgcgtgctgtgtggggagtggatagagaccatgtgggactgtatggaggttgctggtcaagccatgtgccttactgtcttcatgatggtcatggtgattggaaacctagtggtcctgaatctctttctggccttgcttctgagctcatttagtgcagacaaccttgcagccactgatgatgataatgaaatgaataatctccaaattgctgtggataggatgcacaaaggagtagcttatgtgaaaagaaaaatatatgaatttattcaacagtccttcattaggaaacaaaagattttagatgaaattaaaccacttgatgatctaaacaacaagaaagacagttgtatgtccaatcatacaacagaaattgggaaagatcttgactatcttaaagatgtaaatggaactacaagtggtataggaactggcagcagtgttgaaaaatacattattgatgaaagtgattacatgtcattcataaacaaccccagtcttactgtgactgtaccaattgctgtaggagaatctgactttgaaaatttaaacacggaagactttagtagtgaatcggatctggaagaaagcaaagagaaactgaatgaaagcagtagctcatcagaaggtagcactgtggacatcggcgcacctgtagaagaacagcccgtagtggaacctgaagaaactcttgaaccagaagcttgtttcactgaaggctgtgtacaaagattcaagtgttgtcaaatcaatgtggaagaaggcagaggaaaacaatggtggaacctgagaaggacgtgtttccgaatagttgaacataactggtttgagaccttcattgttttcatgattctccttagtagtggtgctctggcatttgaagatatatatattgatcagcgaaagacgattaagacgatgttggaatatgctgacaaggttttcacttacattttcattctggaaatgcttctaaaatgggtggcatatggctatcaaacatatttcaccaatgcctggtgttggctggacttcttaattgttgatgtttcattggtcagtttaacagcaaatgccttgggttactcagaacttggagccatcaaatctctcaggacactaagagctctgagacctctaagagccttatctcgatttgaagggatgagggtggttgtgaatgcccttttaggagcaattccatccatcatgaatgtgcttctggtttgtcttatattctggctaattttcagcatcatgggcgtaaatttgtttgctggcaaattctaccactgtattaacaccacaactggtgacaggtttgacatcgaagacgtgaataatcatactgattgcctaaaactaatagaaagaaatgagactgctcgatggaaaaatgtgaaagtaaactttgataatgtaggatttgggtatctctctttgcttcaagttgccacattcaaaggatggatggatataatgtatgcagcagttgattccagaaatgtggaactccagcctaagtatgaaaaaagtctgtacatgtatctttactttgttattttcatcatctttgggtccttcttcaccttgaacctgtttattggtgtcatcatagataatttcaaccagcagaaaaagaagtttggaggtcaagacatctttatgacagaagaacagaagaaatactataatgcaatgaaaaaattaggatcgaaaaaaccgcaaaagcctatacctcgaccaggaaacaaatttcaaggaatggtctttgacttcgtaaccagacaagtttttgacataagcatcatgattctcatctgtcttaacatggtcacaatgatggtggaaacagatgaccagagtgaatatgtgactaccattttgtcacgcatcaatctggtgttcattgtgctatttactggagagtgtgtactgaaactcatctctctacgccattattattttaccattggatggaatatttttgattttgtggttgtcattctctccattgtaggtatgtttcttgccgagctgatagaaaagtatttcgtgtcccctaccctgttccgagtgatccgtcttgctaggattggccgaatcctacgtctgatcaaaggagcaaaggggatccgcacgctgctctttgctttgatgatgtcccttcctgcgttgtttaacatcggcctcctactcttcctagtcatgttcatctacgccatctttgggatgtccaactttgcctatgttaagagggaagttgggatcgatgacatgttcaactttgagacctttggcaacagcatgatctgcctattccaaattacaacctctgctggccgggatggattgctagcacccattctcaacagtaagccacccgactgtgaccctaataaagttaaccctggaagctcagttaagggagactgtgggaacccatctgttggaattttcttttttgtcagttacatcatcatatccttcctggttgtggtgaacatgtacatcgcggtcatcctggagaacttcagtgttgctactgaagaaagtgcagagcctctgagtgaggatgactttgagatgttctatgaggtttgggagaagtttgatcccgatgcaactcagttcatggaatttgaaaaattatctcagtttgcagctgcgcttgaaccgcctctcaatctgccacaaccaaacaaactccagctcattgccatggatttgcccatggtgagtggtgaccggatccactgtcttgatatcttatttgcttttacaaagcgggttctaggagagagtggagagatggatgctctacgaatacagatggaagagcgattcatggcttccaatccttccaaggtctcctatcagccaatcactactactttaaaacgaaaacaagaggaagtatctgctgtcattattcagcgtgcttacagacgccaccttttaaagcgaactgtaaaacaagcttcctttacgtacaataaaaacaaaatcaaaggtggggctaatcttcttataaaagaagacatgataattgacagaataaatgaaaactctattacagaaaaaactgatctgaccatgtccactgcagcttgtccaccttcctatgaccgggtgacaaagccaattgtggaaaaacatgagcaagaaggcaaagatgaaaaagccaaagggaaataaatgaaaataaataaaaataattgggtgacaaattgtttacagcctgtgaaggtgatgtatttttatcaacaggactcctttaggaggtcaatgccaaactgactgtttttacacaaatctccttaaggtcagtgcctacaataagacagtgaccccttgtcagcaaactgtgactctgtgtaaaggggagatgaccttgacaggaggttactgttctcactaccagctgacactgctgaagataagatgcacaatggctagtcagactgtagggaccagtttcaaggggtgcaaacctgtgattttggggttgtttaacatgaaacactttagtgtagtaattgtatccactgtttgcatttcaactgccacatttgtcacatttttatggaatctgttagtggattcatctttttgttaatccatgtgtttattatatgtgactatttttgtaaacgaagtttctgttgagaaataggctaaggacctctataacaggtatgccacctggggggtatggcaaccacatggccctcccagctacacaaagtcgtggtttgcatgagggcatgctgcacttagagatcatgcatgagaaaaagtcacaagaaaaacaaattcttaaatttcaccatatttctgggaggggtaattgggtgataagtggaggtgctttgttgatcttgttttgcgaaatccagcccctagaccaagtagattatttgtgggtaggccagtaaatcttagcaggtgcaaacttcattcaaatgtttggagtcataaatgttatgtttctttttgttgtattaaaaaaaaaacctgaatagtgaatattgcccctcaccctccaccgccagaagactgaattgaccaaaattactctttataaatttctgctttttcctgcactttgtttagccatctttgggctctcagcaaggttgacactgtatatgttaatgaaatgctatttattatgtaaatagtcattttaccctgtggtgcacgtttgagcaaacaaataatgacctaagcacagtatttattgcatcaaatatgtaccacaagaaatgtagagtgcaagctttacacaggtaataaaatgtattctgtaccatttatagatagtttggatgctatcaatgcatgtttatattaccatgctgctgtatctggtttctctcactgctcagaatctcatttatgagaaaccatatgtcagtggtaaagtcaaggaaattgttcaacagatctcatttatttaagtcattaagcaatagtttgcagcactttaacagctttttggttatttttacattttaagtggataacatatggtatatagccagactgtacagacatgtttaaaaaaacacactgcttaacctattaaatatgtgtttagaattttataagcaaatataaatactgtaaaaagtcactttattttatttttcagcattatgtacataaatatgaagaggaaattatcttcaggttgatatcacaatcacttttcttactttctgtccatagtactttttcatgaaagaaatttgctaaataagacatgaaaacaagactgggtagttgtagatttctgctttttaaattacatttgctaattttagattatttcacaattttaaggagcaaaataggttcacgattcatatccaaattatgctttgcaattggaaaagggtttaaaattttatttatatttctggtagtacctgtactaactgaattgaaggtagtgcttatgttatttttgttctttttttctgacttcggtttatgttttcatttctttggagtaatgctgctctagattgttctaaatagaatgtgggcttcataatttttttttccacaaaaacagagtagtcaacttatatagtcaattacatcaggacattttgtgtttcttacagaagcaaaccataggctcctcttttccttaaaactacttagataaactgtattcgtgaactgcatgctggaaaatgctactattatgctaaataatgctaaccaacatttaaaatgtgcaaaactaataaagattacattttttatttt

SEQ ID NO: 11 - DNA, 8381 bp, Homo sapiens
atactgcagaggtctctggtgcatgtgtgtatgtgtgcgtttgtgtgtgtttgtgtgtctgtgtgttctgccccagtgagactgcagcccttgtaaatactttgacaccttttgcaagaaggaatctgaacaattgcaactgaaggcacattgttatcatctcgtctttgggtgatgctgttcctcactgcagatggataattttccttttaatcaggaatttcatatgcagaataaatggtaattaaaatgtgcaggatgacaagatggagcaaacagtgcttgtaccaccaggacctgacagcttcaacttcttcaccagagaatctcttgcggctattgaaagacgcattgcagaagaaaaggcaaagaatcccaaaccagacaaaaaagatgacgacgaaaatggcccaaagccaaatagtgacttggaagctggaaagaaccttccatttatttatggagacattcctccagagatggtgtcagagcccctggaggacctggacccctactatatcaataagaaaacttttatagtattgaataaattgaaggccatcttccggttcagtgccacctctgccctgtacattttaactcccttcaatcctcttaggaaaatagctattaagattttggtacattcattattcagcatgctaattatgtgcactattttgacaaactgtgtgtttatgacaatgagtaaccctcctgattggacaaagaatgtagaatacaccttcacaggaatatatacttttgaatcacttataaaaattattgcaaggggattctgtttagaagattttactttccttcgggatccatggaactggctcgatttcactgtcattacatttgcgtacgtcacagagtttgtggacctgggcaatgtctcggcattgagaacattcagagttctccgagcattgaagacgatttcagtcattccaggcctgaaaaccattgtgggagccctgatccagtctgtgaagaagctctcagatgtaatgatcctgactgtgttctgtctgagcgtatttgctctaattgggctgcagctgttcatgggcaacctgaggaataaatgtatacaatggcctcccaccaatgcttccttggaggaacatagtatagaaaagaatataactgtgaattataatggtacacttataaatgaaactgtctttgagtttgactggaagtcatatattcaagattcaagatatcattatttcctggagggttttttagatgcactactatgtggaaatagctctgatgcaggccaatgtccagagggatatatgtgtgtgaaagctggtagaaatcccaattatggctacacaagctttgataccttcagttgggcttttttgtccttgtttcgactaatgactcaggacttctgggaaaatctttatcaactgacattacgtgctgctgggaaaacgtacatgatattttttgtattggtcattttcttgggctcattctacctaataaatttgatcctggctgtggtggccatggcctacgaggaacagaatcaggccaccttggaagaagcagaacagaaagaggccgaatttcagcagatgattgaacagcttaaaaagcaacaggaggcagctcagcaggcagcaacggcaactgcctcagaacattccagagagcccagtgcagcaggcaggctctcagacagctcatctgaagcctctaagttgagttccaagagtgctaaggaaagaagaaatcggaggaagaaaagaaaacagaaagagcagtctggtggggaagagaaagatgaggatgaattccaaaaatctgaatctgaggacagcatcaggaggaaaggttttcgcttctccattgaagggaaccgattgacatatgaaaagaggtactcctccccacaccagtctttgttgagcatccgtggctccctattttcaccaaggcgaaatagcagaacaagccttttcagctttagagggcgagcaaaggatgtgggatctgagaacgacttcgcagatgatgagcacagcacctttgaggataacgagagccgtagagattccttgtttgtgccccgacgacacggagagagacgcaacagcaacctgagtcagaccagtaggtcatcccggatgctggcagtgtttccagcgaatgggaagatgcacagcactgtggattgcaatggtgtggtttccttggttggtggaccttcagttcctacatcgcctgttggacagcttctgccagaggtgataatagataagccagctactgatgacaatggaacaaccactgaaactgaaatgagaaagagaaggtcaagttctttccacgtttccatggactttctagaagatccttcccaaaggcaacgagcaatgagtatagccagcattctaacaaatacagtagaagaacttgaagaatccaggcagaaatgcccaccctgttggtataaattttccaacatattcttaatctgggactgttctccatattggttaaaagtgaaacatgttgtcaacctggttgtgatggacccatttgttgacctggccatcaccatctgtattgtcttaaatactcttttcatggccatggagcactatccaatgacggaccatttcaataatgtgcttacagtaggaaacttggttttcactgggatctttacagcagaaatgtttctgaaaattattgccatggatccttactattatttccaagaaggctggaatatctttgacggttttattgtgacgcttagcctggtagaacttggactcgccaatgtggaaggattatctgttctccgttcatttcgattgctgcgagttttcaagttggcaaaatcttggccaacgttaaatatgctaataaagatcatcggcaattccgtgggggctctgggaaatttaaccctcgtcttggccatcatcgtcttcatttttgccgtggtcggcatgcagctctttggtaaaagctacaaagattgtgtctgcaagatcgccagtgattgtcaactcccacgctggcacatgaatgacttcttccactccttcctgattgtgttccgcgtgctgtgtggggagtggatagagaccatgtgggactgtatggaggttgctggtcaagccatgtgccttactgtcttcatgatggtcatggtgattggaaacctagtggtcctgaatctctttctggccttgcttctgagctcatttagtgcagacaaccttgcagccactgatgatgataatgaaatgaataatctccaaattgctgtggataggatgcacaaaggagtagcttatgtgaaaagaaaaatatatgaatttattcaacagtccttcattaggaaacaaaagattttagatgaaattaaaccacttgatgatctaaacaacaagaaagacagttgtatgtccaatcatacaacagaaattgggaaagatcttgactatcttaaagatgtaaatggaactacaagtggtataggaactggcagcagtgttgaaaaatacattattgatgaaagtgattacatgtcattcataaacaaccccagtcttactgtgactgtaccaattgctgtaggagaatctgactttgaaaatttaaacacggaagactttagtagtgaatcggatctggaagaaagcaaagagaaactgaatgaaagcagtagctcatcagaaggtagcactgtggacatcggcgcacctgtagaagaacagcccgtagtggaacctgaagaaactcttgaaccagaagcttgtttcactgaaggctgtgtacaaagattcaagtgttgtcaaatcaatgtggaagaaggcagaggaaaacaatggtggaacctgagaaggacgtgtttccgaatagttgaacataactggtttgagaccttcattgttttcatgattctccttagtagtggtgctctggcatttgaagatatatatattgatcagcgaaagacgattaagacgatgttggaatatgctgacaaggttttcacttacattttcattctggaaatgcttctaaaatgggtggcatatggctatcaaacatatttcaccaatgcctggtgttggctggacttcttaattgttgatgtttcattggtcagtttaacagcaaatgccttgggttactcagaacttggagccatcaaatctctcaggacactaagagctctgagacctctaagagccttatctcgatttgaagggatgagggtggttgtgaatgcccttttaggagcaattccatccatcatgaatgtgcttctggtttgtcttatattctggctaattttcagcatcatgggcgtaaatttgtttgctggcaaattctaccactgtattaacaccacaactggtgacaggtttgacatcgaagacgtgaataatcatactgattgcctaaaactaatagaaagaaatgagactgctcgatggaaaaatgtgaaagtaaactttgataatgtaggatttgggtatctctctttgcttcaagttgccacattcaaaggatggatggatataatgtatgcagcagttgattccagaaatgtggaactccagcctaagtatgaaaaaagtctgtacatgtatctttactttgttattttcatcatctttgggtccttcttcaccttgaacctgtttattggtgtcatcatagataatttcaaccagcagaaaaagaagtttggaggtcaagacatctttatgacagaagaacagaagaaatactataatgcaatgaaaaaattaggatcgaaaaaaccgcaaaagcctatacctcgaccaggaaacaaatttcaaggaatggtctttgacttcgtaaccagacaagtttttgacataagcatcatgattctcatctgtcttaacatggtcacaatgatggtggaaacagatgaccagagtgaatatgtgactaccattttgtcacgcatcaatctggtgttcattgtgctatttactggagagtgtgtactgaaactcatctctctacgccattattattttaccattggatggaatatttttgattttgtggttgtcattctctccattgtaggtatgtttcttgccgagctgatagaaaagtatttcgtgtcccctaccctgttccgagtgatccgtcttgctaggattggccgaatcctacgtctgatcaaaggagcaaaggggatccgcacgctgctctttgctttgatgatgtcccttcctgcgttgtttaacatcggcctcctactcttcctagtcatgttcatctacgccatctttgggatgtccaactttgcctatgttaagagggaagttgggatcgatgacatgttcaactttgagacctttggcaacagcatgatctgcctattccaaattacaacctctgctggctgggatggattgctagcacccattctcaacagtaagccacccgactgtgaccctaataaagttaaccctggaagctcagttaagggagactgtgggaacccatctgttggaattttcttttttgtcagttacatcatcatatccttcctggttgtggtgaacatgtacatcgcggtcatcctggagaacttcagtgttgctactgaagaaagtgcagagcctctgagtgaggatgactttgagatgttctatgaggtttgggagaagtttgatcccgatgcaactcagttcatggaatttgaaaaattatctcagtttgcagctgcgcttgaaccgcctctcaatctgccacaaccaaacaaactccagctcattgccatggatttgcccatggtgagtggtgaccggatccactgtcttgatatcttatttgcttttacaaagcgggttctaggagagagtggagagatggatgctctacgaatacagatggaagagcgattcatggcttccaatccttccaaggtctcctatcagccaatcactactactttaaaacgaaaacaagaggaagtatctgctgtcattactcagcgtgcttacagacgccaccttttaaagcgaactgtaaaacaagcttcctttacgtacaataaaaacaaaatcaaaggtggggctaatcttcttataaaagaagacatgataattgacagaataaatgaaaactctattacagaaaaaactgatctgaccatgtccactgcagcttgtccaccttcctatgaccgggtgacaaagccaattgtggaaaaacatgagcaagaaggcaaagatgaaaaagccaaagggaaataaatgaaaataaataaaaataattgggtgacaaattgtttacagcctgtgaaggtgatgtatttttatcaacaggactcctttaggaggtcaatgccaaactgactgtttttacacaaatctccttaaggtcagtgcctacaataagacagtgaccccttgtcagcaaactgtgactctgtgtaaaggggagatgaccttgacaggaggttactgttctcactaccagctgacactgctgaagataagatgcacaatggctagtcagactgtagggaccagtttcaaggggtgcaaacctgtgattttggggttgtttaacatgaaacactttagtgtagtaattgtatccactgtttgcatttcaactgccacatttgtcacatttttatggaatctgttagtggattcatctttttgttaatccatgtgtttattatatgtgactatttttgtaaacgaagtttctgttgagaaataggctaaggacctctataacaggtatgccacctggggggtatggcaaccacatggccctcccagctacacaaagtcgtggtttgcatgagggcatgctgcacttagagatcatgcatgagaaaaagtcacaagaaaaacaaattcttaaatttcaccatatttctgggaggggtaattgggtgataagtggaggtgctttgttgatcttgttttgcgaaatccagcccctagaccaagtagattatttgtgggtaggccagtaaatcttagcaggtgcaaacttcattcaaatgtttggagtcataaatgttatgtttctttttgttgtattaaaaaaaaaacctgaatagtgaatattgcccctcaccctccaccgccagaagactgaattgaccaaaattactctttataaatttctgctttttcctgcactttgtttagccatctttgggctctcagcaaggttgacactgtatatgttaatgaaatgctatttattatgtaaatagtcattttaccctgtggtgcacgtttgagcaaacaaataatgacctaagcacagtatttattgcatcaaatatgtaccacaagaaatgtagagtgcaagctttacacaggtaataaaatgtattctgtaccatttatagatagtttggatgctatcaatgcatgtttatattaccatgctgctgtatctggtttctctcactgctcagaatctcatttatgagaaaccatatgtcagtggtaaagtcaaggaaattgttcaacagatctcatttatttaagtcattaagcaatagtttgcagcactttaacagctttttggttatttttacattttaagtggataacatatggtatatagccagactgtacagacatgtttaaaaaaacacactgcttaacctattaaatatgtgtttagaattttataagcaaatataaatactgtaaaaagtcactttattttatttttcagcattatgtacataaatatgaagaggaaattatcttcaggttgatatcacaatcacttttcttactttctgtccatagtactttttcatgaaagaaatttgctaaataagacatgaaaacaagactgggtagttgtagatttctgctttttaaattacatttgctaattttagattatttcacaattttaaggagcaaaataggttcacgattcatatccaaattatgctttgcaattggaaaagggtttaaaattttatttatatttctggtagtacctgtactaactgaattgaaggtagtgcttatgttatttttgttctttttttctgacttcggtttatgttttcatttctttggagtaatgctgctctagattgttctaaatagaatgtgggcttcataatttttttttccacaaaaacagagtagtcaacttatatagtcaattacatcaggacattttgtgtttcttacagaagcaaaccataggctcctcttttccttaaaactacttagataaactgtattcgtgaactgcatgctggaaaatgctactattatgctaaataatgctaaccaacatttaaaatgtgcaaaactaataaagattacattttttatttt

SEQ ID NO: 12 - DNA, 8381 bp, Homo sapiens
atactgcagaggtctctggtgcatgtgtgtatgtgtgcgtttgtgtgtgtttgtgtgtctgtgtgttctgccccagtgagactgcagcccttgtaaatactttgacaccttttgcaagaaggaatctgaacaattgcaactgaaggcacattgttatcatctcgtctttgggtgatgctgttcctcactgcagatggataattttccttttaatcaggaatttcatatgcagaataaatggtaattaaaatgtgcaggatgacaagatggagcaaacagtgcttgtaccaccaggacctgacagcttcaacttcttcaccagagaatctcttgcggctattgaaagacgcattgcagaagaaaaggcaaagaatcccaaaccagacaaaaaagatgacgacgaaaatggcccaaagccaaatagtgacttggaagctggaaagaaccttccatttatttatggagacattcctccagagatggtgtcagagcccctggaggacctggacccctactatatcaataagaaaacttttatagtattgaataaattgaaggccatcttccggttcagtgccacctctgccctgtacattttaactcccttcaatcctcttaggaaaatagctattaagattttggtacattcattattcagcatgctaattatgtgcactattttgacaaactgtgtgtttatgacaatgagtaaccctcctgattggacaaagaatgtagaatacaccttcacaggaatatatacttttgaatcacttataaaaattattgcaaggggattctgtttagaagattttactttccttcgggatccatggaactggctcgatttcactgtcattacatttgcgtacgtcacagagtttgtggacctgggcaatgtctcggcattgagaacattcagagttctccgagcattgaagacgatttcagtcattccaggcctgaaaaccattgtgggagccctgatccagtctgtgaagaagctctcagatgtaatgatcctgactgtgttctgtctgagcgtatttgctctaattgggctgcagctgttcatgggcaacctgaggaataaatgtatacaatggcctcccaccaatgcttccttggaggaacatagtatagaaaagaatataactgtgaattataatggtacacttataaatgaaactgtctttgagtttgactggaagtcatatattcaagattcaagatatcattatttcctggagggttttttagatgcactactatgtggaaatagctctgatgcaggccaatgtccagagggatatatgtgtgtgaaagctggtagaaatcccaattatggctacacaagctttgataccttcagttgggcttttttgtccttgtttcgactaatgactcaggacttctgagaaaatctttatcaactgacattacgtgctgctgggaaaacgtacatgatattttttgtattggtcattttcttgggctcattctacctaataaatttgatcctggctgtggtggccatggcctacgaggaacagaatcaggccaccttggaagaagcagaacagaaagaggccgaatttcagcagatgattgaacagcttaaaaagcaacaggaggcagctcagcaggcagcaacggcaactgcctcagaacattccagagagcccagtgcagcaggcaggctctcagacagctcatctgaagcctctaagttgagttccaagagtgctaaggaaagaagaaatcggaggaagaaaagaaaacagaaagagcagtctggtggggaagagaaagatgaggatgaattccaaaaatctgaatctgaggacagcatcaggaggaaaggttttcgcttctccattgaagggaaccgattgacatatgaaaagaggtactcctccccacaccagtctttgttgagcatccgtggctccctattttcaccaaggcgaaatagcagaacaagccttttcagctttagagggcgagcaaaggatgtgggatctgagaacgacttcgcagatgatgagcacagcacctttgaggataacgagagccgtagagattccttgtttgtgccccgacgacacggagagagacgcaacagcaacctgagtcagaccagtaggtcatcccggatgctggcagtgtttccagcgaatgggaagatgcacagcactgtggattgcaatggtgtggtttccttggttggtggaccttcagttcctacatcgcctgttggacagcttctgccagaggtgataatagataagccagctactgatgacaatggaacaaccactgaaactgaaatgagaaagagaaggtcaagttctttccacgtttccatggactttctagaagatccttcccaaaggcaacgagcaatgagtatagccagcattctaacaaatacagtagaagaacttgaagaatccaggcagaaatgcccaccctgttggtataaattttccaacatattcttaatctgggactgttctccatattggttaaaagtgaaacatgttgtcaacctggttgtgatggacccatttgttgacctggccatcaccatctgtattgtcttaaatactcttttcatggccatggagcactatccaatgacggaccatttcaataatgtgcttacagtaggaaacttggttttcactgggatctttacagcagaaatgtttctgaaaattattgccatggatccttactattatttccaagaaggctggaatatctttgacggttttattgtgacgcttagcctggtagaacttggactcgccaatgtggaaggattatctgttctccgttcatttcgattgctgcgagttttcaagttggcaaaatcttggccaacgttaaatatgctaataaagatcatcggcaattccgtgggggctctgggaaatttaaccctcgtcttggccatcatcgtcttcatttttgccgtggtcggcatgcagctctttggtaaaagctacaaagattgtgtctgcaagatcgccagtgattgtcaactcccacgctggcacatgaatgacttcttccactccttcctgattgtgttccgcgtgctgtgtggggagtggatagagaccatgtgggactgtatggaggttgctggtcaagccatgtgccttactgtcttcatgatggtcatggtgattggaaacctagtggtcctgaatctctttctggccttgcttctgagctcatttagtgcagacaaccttgcagccactgatgatgataatgaaatgaataatctccaaattgctgtggataggatgcacaaaggagtagcttatgtgaaaagaaaaatatatgaatttattcaacagtccttcattaggaaacaaaagattttagatgaaattaaaccacttgatgatctaaacaacaagaaagacagttgtatgtccaatcatacaacagaaattgggaaagatcttgactatcttaaagatgtaaatggaactacaagtggtataggaactggcagcagtgttgaaaaatacattattgatgaaagtgattacatgtcattcataaacaaccccagtcttactgtgactgtaccaattgctgtaggagaatctgactttgaaaatttaaacacggaagactttagtagtgaatcggatctggaagaaagcaaagagaaactgaatgaaagcagtagctcatcagaaggtagcactgtggacatcggcgcacctgtagaagaacagcccgtagtggaacctgaagaaactcttgaaccagaagcttgtttcactgaaggctgtgtacaaagattcaagtgttgtcaaatcaatgtggaagaaggcagaggaaaacaatggtggaacctgagaaggacgtgtttccgaatagttgaacataactggtttgagaccttcattgttttcatgattctccttagtagtggtgctctggcatttgaagatatatatattgatcagcgaaagacgattaagacgatgttggaatatgctgacaaggttttcacttacattttcattctggaaatgcttctaaaatgggtggcatatggctatcaaacatatttcaccaatgcctggtgttggctggacttcttaattgttgatgtttcattggtcagtttaacagcaaatgccttgggttactcagaacttggagccatcaaatctctcaggacactaagagctctgagacctctaagagccttatctcgatttgaagggatgagggtggttgtgaatgcccttttaggagcaattccatccatcatgaatgtgcttctggtttgtcttatattctggctaattttcagcatcatgggcgtaaatttgtttgctggcaaattctaccactgtattaacaccacaactggtgacaggtttgacatcgaagacgtgaataatcatactgattgcctaaaactaatagaaagaaatgagactgctcgatggaaaaatgtgaaagtaaactttgataatgtaggatttgggtatctctctttgcttcaagttgccacattcaaaggatggatggatataatgtatgcagcagttgattccagaaatgtggaactccagcctaagtatgaaaaaagtctgtacatgtatctttactttgttattttcatcatctttgggtccttcttcaccttgaacctgtttattggtgtcatcatagataatttcaaccagcagaaaaagaagtttggaggtcaagacatctttatgacagaagaacagaagaaatactataatgcaatgaaaaaattaggatcgaaaaaaccgcaaaagcctatacctcgaccaggaaacaaatttcaaggaatggtctttgacttcgtaaccagacaagtttttgacataagcatcatgattctcatctgtcttaacatggtcacaatgatggtggaaacagatgaccagagtgaatatgtgactaccattttgtcacgcatcaatctggtgttcattgtgctatttactggagagtgtgtactgaaactcatctctctacgccattattattttaccattggatggaatatttttgattttgtggttgtcattctctccattgtaggtatgtttcttgccgagctgatagaaaagtatttcgtgtcccctaccctgttccgagtgatccgtcttgctaggattggccgaatcctacgtctgatcaaaggagcaaaggggatccgcacgctgctctttgctttgatgatgtcccttcctgcgttgtttaacatcggcctcctactcttcctagtcatgttcatctacgccatctttgggatgtccaactttgcctatgttaagagggaagttgggatcgatgacatgttcaactttgagacctttggcaacagcatgatctgcctattccaaattacaacctctgctggctgggatggattgctagcacccattctcaacagtaagccacccgactgtgaccctaataaagttaaccctggaagctcagttaagggagactgtgggaacccatctgttggaattttcttttttgtcagttacatcatcatatccttcctggttgtggtgaacatgtacatcgcggtcatcctggagaacttcagtgttgctactgaagaaagtgcagagcctctgagtgaggatgactttgagatgttctatgaggtttgggagaagtttgatcccgatgcaactcagttcatggaatttgaaaaattatctcagtttgcagctgcgcttgaaccgcctctcaatctgccacaaccaaacaaactccagctcattgccatggatttgcccatggtgagtggtgaccggatccactgtcttgatatcttatttgcttttacaaagcgggttctaggagagagtggagagatggatgctctacgaatacagatggaagagcgattcatggcttccaatccttccaaggtctcctatcagccaatcactactactttaaaacgaaaacaagaggaagtatctgctgtcattattcagcgtgcttacagacgccaccttttaaagcgaactgtaaaacaagcttcctttacgtacaataaaaacaaaatcaaaggtggggctaatcttcttataaaagaagacatgataattgacagaataaatgaaaactctattacagaaaaaactgatctgaccatgtccactgcagcttgtccaccttcctatgaccgggtgacaaagccaattgtggaaaaacatgagcaagaaggcaaagatgaaaaagccaaagggaaataaatgaaaataaataaaaataattgggtgacaaattgtttacagcctgtgaaggtgatgtatttttatcaacaggactcctttaggaggtcaatgccaaactgactgtttttacacaaatctccttaaggtcagtgcctacaataagacagtgaccccttgtcagcaaactgtgactctgtgtaaaggggagatgaccttgacaggaggttactgttctcactaccagctgacactgctgaagataagatgcacaatggctagtcagactgtagggaccagtttcaaggggtgcaaacctgtgattttggggttgtttaacatgaaacactttagtgtagtaattgtatccactgtttgcatttcaactgccacatttgtcacatttttatggaatctgttagtggattcatctttttgttaatccatgtgtttattatatgtgactatttttgtaaacgaagtttctgttgagaaataggctaaggacctctataacaggtatgccacctggggggtatggcaaccacatggccctcccagctacacaaagtcgtggtttgcatgagggcatgctgcacttagagatcatgcatgagaaaaagtcacaagaaaaacaaattcttaaatttcaccatatttctgggaggggtaattgggtgataagtggaggtgctttgttgatcttgttttgcgaaatccagcccctagaccaagtagattatttgtgggtaggccagtaaatcttagcaggtgcaaacttcattcaaatgtttggagtcataaatgttatgtttctttttgttgtattaaaaaaaaaacctgaatagtgaatattgcccctcaccctccaccgccagaagactgaattgaccaaaattactctttataaatttctgctttttcctgcactttgtttagccatctttgggctctcagcaaggttgacactgtatatgttaatgaaatgctatttattatgtaaatagtcattttaccctgtggtgcacgtttgagcaaacaaataatgacctaagcacagtatttattgcatcaaatatgtaccacaagaaatgtagagtgcaagctttacacaggtaataaaatgtattctgtaccatttatagatagtttggatgctatcaatgcatgtttatattaccatgctgctgtatctggtttctctcactgctcagaatctcatttatgagaaaccatatgtcagtggtaaagtcaaggaaattgttcaacagatctcatttatttaagtcattaagcaatagtttgcagcactttaacagctttttggttatttttacattttaagtggataacatatggtatatagccagactgtacagacatgtttaaaaaaacacactgcttaacctattaaatatgtgtttagaattttataagcaaatataaatactgtaaaaagtcactttattttatttttcagcattatgtacataaatatgaagaggaaattatcttcaggttgatatcacaatcacttttcttactttctgtccatagtactttttcatgaaagaaatttgctaaataagacatgaaaacaagactgggtagttgtagatttctgctttttaaattacatttgctaattttagattatttcacaattttaaggagcaaaataggttcacgattcatatccaaattatgctttgcaattggaaaagggtttaaaattttatttatatttctggtagtacctgtactaactgaattgaaggtagtgcttatgttatttttgttctttttttctgacttcggtttatgttttcatttctttggagtaatgctgctctagattgttctaaatagaatgtgggcttcataatttttttttccacaaaaacagagtagtcaacttatatagtcaattacatcaggacattttgtgtttcttacagaagcaaaccataggctcctcttttccttaaaactacttagataaactgtattcgtgaactgcatgctggaaaatgctactattatgctaaataatgctaaccaacatttaaaatgtgcaaaactaataaagattacattttttatttt

SEQ ID NO: 13 - DNA, 8381 bp, Homo sapiens
atactgcagaggtctctggtgcatgtgtgtatgtgtgcgtttgtgtgtgtttgtgtgtctgtgtgttctgccccagtgagactgcagcccttgtaaatactttgacaccttttgcaagaaggaatctgaacaattgcaactgaaggcacattgttatcatctcgtctttgggtgatgctgttcctcactgcagatggataattttccttttaatcaggaatttcatatgcagaataaatggtaattaaaatgtgcaggatgacaagatggagcaaacagtgcttgtaccaccaggacctgacagcttcaacttcttcaccagagaatctcttgcggctattgaaagacgcattgcagaagaaaaggcaaagaatcccaaaccagacaaaaaagatgacgacgaaaatggcccaaagccaaatagtgacttggaagctggaaagaaccttccatttatttatggagacattcctccagagatggtgtcagagcccctggaggacctggacccctactatatcaataagaaaacttttatagtattgaataaattgaaggccatcttccggttcagtgccacctctgccctgtacattttaactcccttcaatcctcttaggaaaatagctattaagattttggtacattcattattcagcatgctaattatgtgcactattttgacaaactgtgtgtttatgacaatgagtaaccctcctgattggacaaagaatgtagaatacaccttcacaggaatatatacttttgaatcacttataaaaattattgcaaggggattctgtttagaagattttactttccttcgggatccatggaactggctcgatttcactgtcattacatttgcgtacgtcacagagtttgtggacctgggcaatgtctcggcattgagaacattcagagttctccgagcattgaagacgatttcagtcattccaggcctgaaaaccattgtgggagccctgatccagtctgtgaagaagctctcagatgtaatgatcctgactgtgttctgtctgagcgtatttgctctaattgggctgcagctgttcatgggcaacctgaggaataaatgtatacaatggcctcccaccaatgcttccttggaggaacatagtatagaaaagaatataactgtgaattataatggtacacttataaatgaaactgtctttgagtttgactggaagtcatatattcaagattcaagatatcattatttcctggagggttttttagatgcactactatgtggaaatagctctgatgcaggccaatgtccagagggatatatgtgtgtgaaagctggtagaaatcccaattatggctacacaagctttgataccttcagttgggcttttttgtccttgtttcgactaatgactcaggacttctgggaaaatctttatcaactgacattacgtgctgctgggaaaacgtaaatgatattttttgtattggtcattttcttgggctcattctacctaataaatttgatcctggctgtggtggccatggcctacgaggaacagaatcaggccaccttggaagaagcagaacagaaagaggccgaatttcagcagatgattgaacagcttaaaaagcaacaggaggcagctcagcaggcagcaacggcaactgcctcagaacattccagagagcccagtgcagcaggcaggctctcagacagctcatctgaagcctctaagttgagttccaagagtgctaaggaaagaagaaatcggaggaagaaaagaaaacagaaagagcagtctggtggggaagagaaagatgaggatgaattccaaaaatctgaatctgaggacagcatcaggaggaaaggttttcgcttctccattgaagggaaccgattgacatatgaaaagaggtactcctccccacaccagtctttgttgagcatccgtggctccctattttcaccaaggcgaaatagcagaacaagccttttcagctttagagggcgagcaaaggatgtgggatctgagaacgacttcgcagatgatgagcacagcacctttgaggataacgagagccgtagagattccttgtttgtgccccgacgacacggagagagacgcaacagcaacctgagtcagaccagtaggtcatcccggatgctggcagtgtttccagcgaatgggaagatgcacagcactgtggattgcaatggtgtggtttccttggttggtggaccttcagttcctacatcgcctgttggacagcttctgccagaggtgataatagataagccagctactgatgacaatggaacaaccactgaaactgaaatgagaaagagaaggtcaagttctttccacgtttccatggactttctagaagatccttcccaaaggcaacgagcaatgagtatagccagcattctaacaaatacagtagaagaacttgaagaatccaggcagaaatgcccaccctgttggtataaattttccaacatattcttaatctgggactgttctccatattggttaaaagtgaaacatgttgtcaacctggttgtgatggacccatttgttgacctggccatcaccatctgtattgtcttaaatactcttttcatggccatggagcactatccaatgacggaccatttcaataatgtgcttacagtaggaaacttggttttcactgggatctttacagcagaaatgtttctgaaaattattgccatggatccttactattatttccaagaaggctggaatatctttgacggttttattgtgacgcttagcctggtagaacttggactcgccaatgtggaaggattatctgttctccgttcatttcgattgctgcgagttttcaagttggcaaaatcttggccaacgttaaatatgctaataaagatcatcggcaattccgtgggggctctgggaaatttaaccctcgtcttggccatcatcgtcttcatttttgccgtggtcggcatgcagctctttggtaaaagctacaaagattgtgtctgcaagatcgccagtgattgtcaactcccacgctggcacatgaatgacttcttccactccttcctgattgtgttccgcgtgctgtgtggggagtggatagagaccatgtgggactgtatggaggttgctggtcaagccatgtgccttactgtcttcatgatggtcatggtgattggaaacctagtggtcctgaatctctttctggccttgcttctgagctcatttagtgcagacaaccttgcagccactgatgatgataatgaaatgaataatctccaaattgctgtggataggatgcacaaaggagtagcttatgtgaaaagaaaaatatatgaatttattcaacagtccttcattaggaaacaaaagattttagatgaaattaaaccacttgatgatctaaacaacaagaaagacagttgtatgtccaatcatacaacagaaattgggaaagatcttgactatcttaaagatgtaaatggaactacaagtggtataggaactggcagcagtgttgaaaaatacattattgatgaaagtgattacatgtcattcataaacaaccccagtcttactgtgactgtaccaattgctgtaggagaatctgactttgaaaatttaaacacggaagactttagtagtgaatcggatctggaagaaagcaaagagaaactgaatgaaagcagtagctcatcagaaggtagcactgtggacatcggcgcacctgtagaagaacagcccgtagtggaacctgaagaaactcttgaaccagaagcttgtttcactgaaggctgtgtacaaagattcaagtgttgtcaaatcaatgtggaagaaggcagaggaaaacaatggtggaacctgagaaggacgtgtttccgaatagttgaacataactggtttgagaccttcattgttttcatgattctccttagtagtggtgctctggcatttgaagatatatatattgatcagcgaaagacgattaagacgatgttggaatatgctgacaaggttttcacttacattttcattctggaaatgcttctaaaatgggtggcatatggctatcaaacatatttcaccaatgcctggtgttggctggacttcttaattgttgatgtttcattggtcagtttaacagcaaatgccttgggttactcagaacttggagccatcaaatctctcaggacactaagagctctgagacctctaagagccttatctcgatttgaagggatgagggtggttgtgaatgcccttttaggagcaattccatccatcatgaatgtgcttctggtttgtcttatattctggctaattttcagcatcatgggcgtaaatttgtttgctggcaaattctaccactgtattaacaccacaactggtgacaggtttgacatcgaagacgtgaataatcatactgattgcctaaaactaatagaaagaaatgagactgctcgatggaaaaatgtgaaagtaaactttgataatgtaggatttgggtatctctctttgcttcaagttgccacattcaaaggatggatggatataatgtatgcagcagttgattccagaaatgtggaactccagcctaagtatgaaaaaagtctgtacatgtatctttactttgttattttcatcatctttgggtccttcttcaccttgaacctgtttattggtgtcatcatagataatttcaaccagcagaaaaagaagtttggaggtcaagacatctttatgacagaagaacagaagaaatactataatgcaatgaaaaaattaggatcgaaaaaaccgcaaaagcctatacctcgaccaggaaacaaatttcaaggaatggtctttgacttcgtaaccagacaagtttttgacataagcatcatgattctcatctgtcttaacatggtcacaatgatggtggaaacagatgaccagagtgaatatgtgactaccattttgtcacgcatcaatctggtgttcattgtgctatttactggagagtgtgtactgaaactcatctctctacgccattattattttaccattggatggaatatttttgattttgtggttgtcattctctccattgtaggtatgtttcttgccgagctgatagaaaagtatttcgtgtcccctaccctgttccgagtgatccgtcttgctaggattggccgaatcctacgtctgatcaaaggagcaaaggggatccgcacgctgctctttgctttgatgatgtcccttcctgcgttgtttaacatcggcctcctactcttcctagtcatgttcatctacgccatctttgggatgtccaactttgcctatgttaagagggaagttgggatcgatgacatgttcaactttgagacctttggcaacagcatgatctgcctattccaaattacaacctctgctggctgggatggattgctagcacccattctcaacagtaagccacccgactgtgaccctaataaagttaaccctggaagctcagttaagggagactgtgggaacccatctgttggaattttcttttttgtcagttacatcatcatatccttcctggttgtggtgaacatgtacatcgcggtcatcctggagaacttcagtgttgctactgaagaaagtgcagagcctctgagtgaggatgactttgagatgttctatgaggtttgggagaagtttgatcccgatgcaactcagttcatggaatttgaaaaattatctcagtttgcagctgcgcttgaaccgcctctcaatctgccacaaccaaacaaactccagctcattgccatggatttgcccatggtgagtggtgaccggatccactgtcttgatatcttatttgcttttacaaagcgggttctaggagagagtggagagatggatgctctacgaatacagatggaagagcgattcatggcttccaatccttccaaggtctcctatcagccaatcactactactttaaaacgaaaacaagaggaagtatctgctgtcattattcagcgtgcttacagacgccaccttttaaagcgaactgtaaaacaagcttcctttacgtacaataaaaacaaaatcaaaggtggggctaatcttcttataaaagaagacatgataattgacagaataaatgaaaactctattacagaaaaaactgatctgaccatgtccactgcagcttgtccaccttcctatgaccgggtgacaaagccaattgtggaaaaacatgagcaagaaggcaaagatgaaaaagccaaagggaaataaatgaaaataaataaaaataattgggtgacaaattgtttacagcctgtgaaggtgatgtatttttatcaacaggactcctttaggaggtcaatgccaaactgactgtttttacacaaatctccttaaggtcagtgcctacaataagacagtgaccccttgtcagcaaactgtgactctgtgtaaaggggagatgaccttgacaggaggttactgttctcactaccagctgacactgctgaagataagatgcacaatggctagtcagactgtagggaccagtttcaaggggtgcaaacctgtgattttggggttgtttaacatgaaacactttagtgtagtaattgtatccactgtttgcatttcaactgccacatttgtcacatttttatggaatctgttagtggattcatctttttgttaatccatgtgtttattatatgtgactatttttgtaaacgaagtttctgttgagaaataggctaaggacctctataacaggtatgccacctggggggtatggcaaccacatggccctcccagctacacaaagtcgtggtttgcatgagggcatgctgcacttagagatcatgcatgagaaaaagtcacaagaaaaacaaattcttaaatttcaccatatttctgggaggggtaattgggtgataagtggaggtgctttgttgatcttgttttgcgaaatccagcccctagaccaagtagattatttgtgggtaggccagtaaatcttagcaggtgcaaacttcattcaaatgtttggagtcataaatgttatgtttctttttgttgtattaaaaaaaaaacctgaatagtgaatattgcccctcaccctccaccgccagaagactgaattgaccaaaattactctttataaatttctgctttttcctgcactttgtttagccatctttgggctctcagcaaggttgacactgtatatgttaatgaaatgctatttattatgtaaatagtcattttaccctgtggtgcacgtttgagcaaacaaataatgacctaagcacagtatttattgcatcaaatatgtaccacaagaaatgtagagtgcaagctttacacaggtaataaaatgtattctgtaccatttatagatagtttggatgctatcaatgcatgtttatattaccatgctgctgtatctggtttctctcactgctcagaatctcatttatgagaaaccatatgtcagtggtaaagtcaaggaaattgttcaacagatctcatttatttaagtcattaagcaatagtttgcagcactttaacagctttttggttatttttacattttaagtggataacatatggtatatagccagactgtacagacatgtttaaaaaaacacactgcttaacctattaaatatgtgtttagaattttataagcaaatataaatactgtaaaaagtcactttattttatttttcagcattatgtacataaatatgaagaggaaattatcttcaggttgatatcacaatcacttttcttactttctgtccatagtactttttcatgaaagaaatttgctaaataagacatgaaaacaagactgggtagttgtagatttctgctttttaaattacatttgctaattttagattatttcacaattttaaggagcaaaataggttcacgattcatatccaaattatgctttgcaattggaaaagggtttaaaattttatttatatttctggtagtacctgtactaactgaattgaaggtagtgcttatgttatttttgttctttttttctgacttcggtttatgttttcatttctttggagtaatgctgctctagattgttctaaatagaatgtgggcttcataatttttttttccacaaaaacagagtagtcaacttatatagtcaattacatcaggacattttgtgtttcttacagaagcaaaccataggctcctcttttccttaaaactacttagataaactgtattcgtgaactgcatgctggaaaatgctactattatgctaaataatgctaaccaacatttaaaatgtgcaaaactaataaagattacattttttatttt

SEQ ID NO: 14 - DNA, 8381 bp, Homo sapiens
atactgcagaggtctctggtgcatgtgtgtatgtgtgcgtttgtgtgtgtttgtgtgtctgtgtgttctgccccagtgagactgcagcccttgtaaatactttgacaccttttgcaagaaggaatctgaacaattgcaactgaaggcacattgttatcatctcgtctttgggtgatgctgttcctcactgcagatggataattttccttttaatcaggaatttcatatgcagaataaatggtaattaaaatgtgcaggatgacaagatggagcaaacagtgcttgtaccaccaggacctgacagcttcaacttcttcaccagagaatctcttgcggctattgaaagacgcattgcagaagaaaaggcaaagaatcccaaaccagacaaaaaagatgacgacgaaaatggcccaaagccaaatagtgacttggaagctggaaagaaccttccatttatttatggagacattcctccagagatggtgtcagagcccctggaggacctggacccctactatatcaataagaaaacttttatagtattgaataaattgaaggccatcttccggttcagtgccacctctgccctgtacattttaactcccttcaatcctcttaggaaaatagctattaagattttggtacattcattattcagcatgctaattatgtgcactattttgacaaactgtgtgtttatgacaatgagtaaccctcctgattggacaaagaatgtagaatacaccttcacaggaatatatacttttgaatcacttataaaaattattgcaaggggattctgtttagaagattttactttccttcgggatccatggaactggctcgatttcactgtcattacatttgcgtacgtcacagagtttgtggacctgggcaatgtctcggcattgagaacattcagagttctccgagcattgaagacgatttcagtcattccaggcctgaaaaccattgtgggagccctgatccagtctgtgaagaagctctcagatgtaatgatcctgactgtgttctgtctgagcgtatttgctctaattgggctgcagctgttcatgggcaacctgaggaataaatgtatacaatggcctcccaccaatgcttccttggaggaacatagtatagaaaagaatataactgtgaattataatggtacacttataaatgaaactgtctttgagtttgactggaagtcatatattcaagattcaagatatcattatttcctggagggttttttagatgcactactatgtggaaatagctctgatgcaggccaatgtccagagggatatatgtgtgtgaaagctggtagaaatcccaattatggctacacaagctttgataccttcagttgggcttttttgtccttgtttcgactaatgactcaggacttctgggaaaatctttatcaactgacattacgtgctgctgggaaaacgtacatgatattttttgtattggtcattttcttgggctcattctacctaataaatttgatcctggctgtggtggccatggcctacgaggaacagaatcaggccaccttggaagaagcagaacagaaagaggccgaatttcagcagatgattgaacagcttaaaaagcaacaggaggcagctcagcaggcagcaacggcaactgcctcagaacattccagagagcccagtgcagcaggcaggctctcagacagctcatctgaagcctctaagttgagttccaagagtgctaaggaaagaagaaatcggaggaagaaaagaaaacagaaagagcagtctggtggggaagagaaagatgaggatgaattccaaaaatctgaatctgaggacagcatcaggaggaaaggttttcgcttctccattgaagggaaccgattgacatatgaaaagaggtactcctccccacaccagtctttgttgagcatccgtggctccctattttcaccaaggcgaaatagcagaacaagccttttcagctttagagggcgagcaaaggatgtgggatctgagaacgacttcgcagatgatgagcacagcacctttgaggataacgagagccgtagagattccttgtttgtgccccgacgacacggagagagacgcaacagcaacctgagtcagaccagtaggtcatcccggatgctggcagtgtttccagcgaatgggaagatgcacagcactgtggattgcaatggtgtggtttccttggttggtggaccttcagttcctacatcgcctgttggacagcttctgccagaggtgataatagataagccagctactgatgacaatggaacaaccactgaaactgaaatgagaaagagaaggtcaagttctttccacgtttccatggactttctagaagatccttcccaaaggcaacgagcaatgagtatagccagcattctaacaaatacagtagaagaacttgaagaatccaggcagaaatgcccaccctgttggtataaattttccaacatattcttaatctgggactgttctccatattggttaaaagtgaaacatgttgtcaacctggttgtgatggacccatttgttgacctggccatcaccatctgtattgtcttaaatactcttttcatggccatggagcactatccaatgacggaccatttcaataatgtgcttacagtaggaaacttggttttcactgggatctttacagcagaaatgtttctgaaaattattgccatggatccttactattatttccaagaaggctggaatatctttgacggttttattgtgacgcttagcctggtagaacttggactcgccaatgtggaaggattatctgttctccgttcatttcgattgctgcgagttttcaagttggcaaaatcttggccaacgttaaatatgctaataaagatcatcggcaattccgtgggggctctgggaaatttaaccctcgtcttggccatcatcgtcttcatttttgccgtggtcggcatgcagctctttggtaaaagctacaaagattgtgtctgcaagatcgccagtgattgtcaactcccacgctggcacatgaatgacttcttccactccttcctgattgtgttccgcgtgctgtgtggggagtggatagagaccatgtgggactgtatggaggttgctggttaagccatgtgccttactgtcttcatgatggtcatggtgattggaaacctagtggtcctgaatctctttctggccttgcttctgagctcatttagtgcagacaaccttgcagccactgatgatgataatgaaatgaataatctccaaattgctgtggataggatgcacaaaggagtagcttatgtgaaaagaaaaatatatgaatttattcaacagtccttcattaggaaacaaaagattttagatgaaattaaaccacttgatgatctaaacaacaagaaagacagttgtatgtccaatcatacaacagaaattgggaaagatcttgactatcttaaagatgtaaatggaactacaagtggtataggaactggcagcagtgttgaaaaatacattattgatgaaagtgattacatgtcattcataaacaaccccagtcttactgtgactgtaccaattgctgtaggagaatctgactttgaaaatttaaacacggaagactttagtagtgaatcggatctggaagaaagcaaagagaaactgaatgaaagcagtagctcatcagaaggtagcactgtggacatcggcgcacctgtagaagaacagcccgtagtggaacctgaagaaactcttgaaccagaagcttgtttcactgaaggctgtgtacaaagattcaagtgttgtcaaatcaatgtggaagaaggcagaggaaaacaatggtggaacctgagaaggacgtgtttccgaatagttgaacataactggtttgagaccttcattgttttcatgattctccttagtagtggtgctctggcatttgaagatatatatattgatcagcgaaagacgattaagacgatgttggaatatgctgacaaggttttcacttacattttcattctggaaatgcttctaaaatgggtggcatatggctatcaaacatatttcaccaatgcctggtgttggctggacttcttaattgttgatgtttcattggtcagtttaacagcaaatgccttgggttactcagaacttggagccatcaaatctctcaggacactaagagctctgagacctctaagagccttatctcgatttgaagggatgagggtggttgtgaatgcccttttaggagcaattccatccatcatgaatgtgcttctggtttgtcttatattctggctaattttcagcatcatgggcgtaaatttgtttgctggcaaattctaccactgtattaacaccacaactggtgacaggtttgacatcgaagacgtgaataatcatactgattgcctaaaactaatagaaagaaatgagactgctcgatggaaaaatgtgaaagtaaactttgataatgtaggatttgggtatctctctttgcttcaagttgccacattcaaaggatggatggatataatgtatgcagcagttgattccagaaatgtggaactccagcctaagtatgaaaaaagtctgtacatgtatctttactttgttattttcatcatctttgggtccttcttcaccttgaacctgtttattggtgtcatcatagataatttcaaccagcagaaaaagaagtttggaggtcaagacatctttatgacagaagaacagaagaaatactataatgcaatgaaaaaattaggatcgaaaaaaccgcaaaagcctatacctcgaccaggaaacaaatttcaaggaatggtctttgacttcgtaaccagacaagtttttgacataagcatcatgattctcatctgtcttaacatggtcacaatgatggtggaaacagatgaccagagtgaatatgtgactaccattttgtcacgcatcaatctggtgttcattgtgctatttactggagagtgtgtactgaaactcatctctctacgccattattattttaccattggatggaatatttttgattttgtggttgtcattctctccattgtaggtatgtttcttgccgagctgatagaaaagtatttcgtgtcccctaccctgttccgagtgatccgtcttgctaggattggccgaatcctacgtctgatcaaaggagcaaaggggatccgcacgctgctctttgctttgatgatgtcccttcctgcgttgtttaacatcggcctcctactcttcctagtcatgttcatctacgccatctttgggatgtccaactttgcctatgttaagagggaagttgggatcgatgacatgttcaactttgagacctttggcaacagcatgatctgcctattccaaattacaacctctgctggctgggatggattgctagcacccattctcaacagtaagccacccgactgtgaccctaataaagttaaccctggaagctcagttaagggagactgtgggaacccatctgttggaattttcttttttgtcagttacatcatcatatccttcctggttgtggtgaacatgtacatcgcggtcatcctggagaacttcagtgttgctactgaagaaagtgcagagcctctgagtgaggatgactttgagatgttctatgaggtttgggagaagtttgatcccgatgcaactcagttcatggaatttgaaaaattatctcagtttgcagctgcgcttgaaccgcctctcaatctgccacaaccaaacaaactccagctcattgccatggatttgcccatggtgagtggtgaccggatccactgtcttgatatcttatttgcttttacaaagcgggttctaggagagagtggagagatggatgctctacgaatacagatggaagagcgattcatggcttccaatccttccaaggtctcctatcagccaatcactactactttaaaacgaaaacaagaggaagtatctgctgtcattattcagcgtgcttacagacgccaccttttaaagcgaactgtaaaacaagcttcctttacgtacaataaaaacaaaatcaaaggtggggctaatcttcttataaaagaagacatgataattgacagaataaatgaaaactctattacagaaaaaactgatctgaccatgtccactgcagcttgtccaccttcctatgaccgggtgacaaagccaattgtggaaaaacatgagcaagaaggcaaagatgaaaaagccaaagggaaataaatgaaaataaataaaaataattgggtgacaaattgtttacagcctgtgaaggtgatgtatttttatcaacaggactcctttaggaggtcaatgccaaactgactgtttttacacaaatctccttaaggtcagtgcctacaataagacagtgaccccttgtcagcaaactgtgactctgtgtaaaggggagatgaccttgacaggaggttactgttctcactaccagctgacactgctgaagataagatgcacaatggctagtcagactgtagggaccagtttcaaggggtgcaaacctgtgattttggggttgtttaacatgaaacactttagtgtagtaattgtatccactgtttgcatttcaactgccacatttgtcacatttttatggaatctgttagtggattcatctttttgttaatccatgtgtttattatatgtgactatttttgtaaacgaagtttctgttgagaaataggctaaggacctctataacaggtatgccacctggggggtatggcaaccacatggccctcccagctacacaaagtcgtggtttgcatgagggcatgctgcacttagagatcatgcatgagaaaaagtcacaagaaaaacaaattcttaaatttcaccatatttctgggaggggtaattgggtgataagtggaggtgctttgttgatcttgttttgcgaaatccagcccctagaccaagtagattatttgtgggtaggccagtaaatcttagcaggtgcaaacttcattcaaatgtttggagtcataaatgttatgtttctttttgttgtattaaaaaaaaaacctgaatagtgaatattgcccctcaccctccaccgccagaagactgaattgaccaaaattactctttataaatttctgctttttcctgcactttgtttagccatctttgggctctcagcaaggttgacactgtatatgttaatgaaatgctatttattatgtaaatagtcattttaccctgtggtgcacgtttgagcaaacaaataatgacctaagcacagtatttattgcatcaaatatgtaccacaagaaatgtagagtgcaagctttacacaggtaataaaatgtattctgtaccatttatagatagtttggatgctatcaatgcatgtttatattaccatgctgctgtatctggtttctctcactgctcagaatctcatttatgagaaaccatatgtcagtggtaaagtcaaggaaattgttcaacagatctcatttatttaagtcattaagcaatagtttgcagcactttaacagctttttggttatttttacattttaagtggataacatatggtatatagccagactgtacagacatgtttaaaaaaacacactgcttaacctattaaatatgtgtttagaattttataagcaaatataaatactgtaaaaagtcactttattttatttttcagcattatgtacataaatatgaagaggaaattatcttcaggttgatatcacaatcacttttcttactttctgtccatagtactttttcatgaaagaaatttgctaaataagacatgaaaacaagactgggtagttgtagatttctgctttttaaattacatttgctaattttagattatttcacaattttaaggagcaaaataggttcacgattcatatccaaattatgctttgcaattggaaaagggtttaaaattttatttatatttctggtagtacctgtactaactgaattgaaggtagtgcttatgttatttttgttctttttttctgacttcggtttatgttttcatttctttggagtaatgctgctctagattgttctaaatagaatgtgggcttcataatttttttttccacaaaaacagagtagtcaacttatatagtcaattacatcaggacattttgtgtttcttacagaagcaaaccataggctcctcttttccttaaaactacttagataaactgtattcgtgaactgcatgctggaaaatgctactattatgctaaataatgctaaccaacatttaaaatgtgcaaaactaataaagattacattttttatttt

SEQ ID NO: 15 - DNA, 8381 bp, Homo sapiens
atactgcagaggtctctggtgcatgtgtgtatgtgtgcgtttgtgtgtgtttgtgtgtctgtgtgttctgccccagtgagactgcagcccttgtaaatactttgacaccttttgcaagaaggaatctgaacaattgcaactgaaggcacattgttatcatctcgtctttgggtgatgctgttcctcactgcagatggataattttccttttaatcaggaatttcatatgcagaataaatggtaattaaaatgtgcaggatgacaagatggagcaaacagtgcttgtaccaccaggacctgacagcttcaacttcttcaccagagaatctcttgcggctattgaaagacgcattgcagaagaaaaggcaaagaatcccaaaccagacaaaaaagatgacgacgaaaatggcccaaagccaaatagtgacttggaagctggaaagaaccttccatttatttatggagacattcctccagagatggtgtcagagcccctggaggacctggacccctactatatcaataagaaaacttttatagtattgaataaattgaaggccatcttccggttcagtgccacctctgccctgtacattttaactcccttcaatcctcttaggaaaatagctattaagattttggtacattcattattcagcatgctaattatgtgcactattttgacaaactgtgtgtttatgacaatgagtaaccctcctgattggacaaagaatgtagaatacaccttcacaggaatatatacttttgaatcacttataaaaattattgcaaggggattctgtttagaagattttactttccttcgggatccatggaactggctcgatttcactgtcattacatttgcgtacgtcacagagtttgtggacctgggcaatgtctcggcattgagaacattcagagttctccgagcattgaagacgatttcagtcattccaggcctgaaaaccattgtgggagccctgatccagtctgtgaagaagctctcagatgtaatgatcctgactgtgttctgtctgagcgtatttgctctaattgggctgcagctgttcatgggcaacctgaggaataaatgtatacaatggcctcccaccaatgcttccttggaggaacatagtatagaaaagaatataactgtgaattataatggtacacttataaatgaaactgtctttgagtttgactggaagtcatatattcaagattcaagatatcattatttcctggagggttttttagatgcactactatgtggaaatagctctgatgcaggccaatgtccagagggatatatgtgtgtgaaagctggtagaaatcccaattatggctacacaagctttgataccttcagttgggcttttttgtccttgtttcgactaatgactcaggacttctgggaaaatctttatcaactgacattacgtgctgctgggaaaacgtacatgatattttttgtattggtcattttcttgggctcattctacctaataaatttgatcctggctgtggtggccatggcctacgaggaacagaatcaggccaccttggaagaagcagaacagaaagaggccgaatttcagcagatgattgaacagcttaaaaagcaacaggaggcagctcagcaggcagcaacggcaactgcctcagaacattccagagagcccagtgcagcaggcaggctctcagacagctcatctgaagcctctaagttgagttccaagagtgctaaggaaagaagaaatcggaggaagaaaagaaaacagaaagagcagtctggtggggaagagaaagatgaggatgaattccaaaaatctgaatctgaggacagcatcaggaggaaaggttttcgcttctccattgaagggaaccgattgacatatgaaaagaggtactcctccccacaccagtctttgttgagcatccgtggctccctattttcaccaaggcgaaatagcagaacaagccttttcagctttagagggcgagcaaaggatgtgggatctgagaacgacttcgcagatgatgagcacagcacctttgaggataacgagagccgtagagattccttgtttgtgccccgacgacacggagagagacgcaacagcaacctgagtcagaccagtaggtcatcccggatgctggcagtgtttccagcgaatgggaagatgcacagcactgtggattgcaatggtgtggtttccttggttggtggaccttcagttcctacatcgcctgttggacagcttctgccagaggtgataatagataagccagctactgatgacaatggaacaaccactgaaactgaaatgagaaagagaaggtcaagttctttccacgtttccatggactttctagaagatccttcccaaaggcaacgagcaatgagtatagccagcattctaacaaatacagtagaagaacttgaagaatccaggcagaaatgcccaccctgttggtataaattttccaacatattcttaatctgggactgttctccatattggttaaaagtgaaacatgttgtcaacctggttgtgatggacccatttgttgacctggccatcaccatctgtattgtcttaaatactcttttcatggccatggagcactatccaatgacggaccatttcaataatgtgcttacagtaggaaacttggttttcactgggatctttacagcagaaatgtttctgaaaattattgccatggatccttactattatttccaagaaggctggaatatctttgacggttttattgtgacgcttagcctggtagaacttggactcgccaatgtggaaggattatctgttctccgttcatttcgattgctgcgagttttcaagttggcaaaatcttggccaacgttaaatatgctaataaagatcatcggcaattccgtgggggctctgggaaatttaaccctcgtcttggccatcatcgtcttcatttttgccgtggtcggcatgcagctctttggtaaaagctacaaagattgtgtctgcaagatcgccagtgattgtcaactcccacgctggcacatgaatgacttcttccactccttcctgattgtgttccgcgtgctgtgtggggagtggatagagaccatgtgggactgtatggaggttgctggtcaagccatgtgccttactgtcttcatgatggtcatggtgattggaaacctagtggtcctgaatctctttctggccttgcttctgagctcatttagtgcagacaaccttgcagccactgatgatgataatgaaatgaataatctccaaattgctgtggataggatgcacaaaggagtagcttatgtgaaaagaaaaatatatgaatttattcaacagtccttcattaggaaacaaaagattttagatgaaattaaaccacttgatgatctaaacaacaagaaagacagttgtatgtccaatcatacaacagaaattgggaaagatcttgactatcttaaagatgtaaatggaactacaagtggtataggaactggcagcagtgttgaaaaatacattattgatgaaagtgattacatgtcattcataaacaaccccagtcttactgtgactgtaccaattgctgtaggagaatctgactttgaaaatttaaacacggaagactttagtagtgaatcggatctggaagaaagcaaagagaaactgaatgaaagcagtagctcatcagaaggtagcactgtggacatcggcgcacctgtagaagaacagcccgtagtggaacctgaagaaactcttgaaccagaagcttgtttcactgaaggctgtgtacaaagattcaagtgttgtcaaatcaatgtggaagaaggcagaggaaaacaatggtggaacctgagaaggacgtgtttccgaatagttgaacataactggtttgagaccttcattgttttcatgattctccttagtagtggtgctctggcatttgaagatatatatattgatcagcgaaagacgattaagacgatgttggaatatgctgacaaggttttcacttacattttcattctggaaatgcttctaaaatgggtggcatatggctatcaaacatatttcaccaatgcctggtgttggctggacttcttaattgttgatgtttcattggtcagtttaacagcaaatgccttgggttactcagaacttggagccatcaaatctctcaggacactaagagctctgagacctctaagagccttatctcgatttgaagggatgagggtggttgtgaatgcccttttaggagcaattccatccatcatgaatgtgcttctggtttgtcttatattctggctaattttcagcatcatgggcgtaaatttgtttgctggcaaattctaccactgtattaacaccacaactggtgacaggtttgacatcgaagacgtgaataatcatactgattgcctaaaactaatagaaagaaatgagactgctcgatggaaaaatgtgaaagtaaactttgataatgtaggatttgggtatctctctttgcttcaagttgccacattcaaaggatggatggatataatgtatgcagcagttgattccagaaatgtggaactccagcctaagtatgaaaaaagtctgtacatgtatctttactttgttattttcatcatctttgggtccttcttcaccttgaacctgtttattggtgtcatcatagataatttcaaccagcagaaaaagaagtttggaggtcaagacatctttatgacagaagaacagaagaaatactataatgcaatgaaaaaattaggatcgaaaaaaccgcaaaagcctataccttgaccaggaaacaaatttcaaggaatggtctttgacttcgtaaccagacaagtttttgacataagcatcatgattctcatctgtcttaacatggtcacaatgatggtggaaacagatgaccagagtgaatatgtgactaccattttgtcacgcatcaatctggtgttcattgtgctatttactggagagtgtgtactgaaactcatctctctacgccattattattttaccattggatggaatatttttgattttgtggttgtcattctctccattgtaggtatgtttcttgccgagctgatagaaaagtatttcgtgtcccctaccctgttccgagtgatccgtcttgctaggattggccgaatcctacgtctgatcaaaggagcaaaggggatccgcacgctgctctttgctttgatgatgtcccttcctgcgttgtttaacatcggcctcctactcttcctagtcatgttcatctacgccatctttgggatgtccaactttgcctatgttaagagggaagttgggatcgatgacatgttcaactttgagacctttggcaacagcatgatctgcctattccaaattacaacctctgctggctgggatggattgctagcacccattctcaacagtaagccacccgactgtgaccctaataaagttaaccctggaagctcagttaagggagactgtgggaacccatctgttggaattttcttttttgtcagttacatcatcatatccttcctggttgtggtgaacatgtacatcgcggtcatcctggagaacttcagtgttgctactgaagaaagtgcagagcctctgagtgaggatgactttgagatgttctatgaggtttgggagaagtttgatcccgatgcaactcagttcatggaatttgaaaaattatctcagtttgcagctgcgcttgaaccgcctctcaatctgccacaaccaaacaaactccagctcattgccatggatttgcccatggtgagtggtgaccggatccactgtcttgatatcttatttgcttttacaaagcgggttctaggagagagtggagagatggatgctctacgaatacagatggaagagcgattcatggcttccaatccttccaaggtctcctatcagccaatcactactactttaaaacgaaaacaagaggaagtatctgctgtcattattcagcgtgcttacagacgccaccttttaaagcgaactgtaaaacaagcttcctttacgtacaataaaaacaaaatcaaaggtggggctaatcttcttataaaagaagacatgataattgacagaataaatgaaaactctattacagaaaaaactgatctgaccatgtccactgcagcttgtccaccttcctatgaccgggtgacaaagccaattgtggaaaaacatgagcaagaaggcaaagatgaaaaagccaaagggaaataaatgaaaataaataaaaataattgggtgacaaattgtttacagcctgtgaaggtgatgtatttttatcaacaggactcctttaggaggtcaatgccaaactgactgtttttacacaaatctccttaaggtcagtgcctacaataagacagtgaccccttgtcagcaaactgtgactctgtgtaaaggggagatgaccttgacaggaggttactgttctcactaccagctgacactgctgaagataagatgcacaatggctagtcagactgtagggaccagtttcaaggggtgcaaacctgtgattttggggttgtttaacatgaaacactttagtgtagtaattgtatccactgtttgcatttcaactgccacatttgtcacatttttatggaatctgttagtggattcatctttttgttaatccatgtgtttattatatgtgactatttttgtaaacgaagtttctgttgagaaataggctaaggacctctataacaggtatgccacctggggggtatggcaaccacatggccctcccagctacacaaagtcgtggtttgcatgagggcatgctgcacttagagatcatgcatgagaaaaagtcacaagaaaaacaaattcttaaatttcaccatatttctgggaggggtaattgggtgataagtggaggtgctttgttgatcttgttttgcgaaatccagcccctagaccaagtagattatttgtgggtaggccagtaaatcttagcaggtgcaaacttcattcaaatgtttggagtcataaatgttatgtttctttttgttgtattaaaaaaaaaacctgaatagtgaatattgcccctcaccctccaccgccagaagactgaattgaccaaaattactctttataaatttctgctttttcctgcactttgtttagccatctttgggctctcagcaaggttgacactgtatatgttaatgaaatgctatttattatgtaaatagtcattttaccctgtggtgcacgtttgagcaaacaaataatgacctaagcacagtatttattgcatcaaatatgtaccacaagaaatgtagagtgcaagctttacacaggtaataaaatgtattctgtaccatttatagatagtttggatgctatcaatgcatgtttatattaccatgctgctgtatctggtttctctcactgctcagaatctcatttatgagaaaccatatgtcagtggtaaagtcaaggaaattgttcaacagatctcatttatttaagtcattaagcaatagtttgcagcactttaacagctttttggttatttttacattttaagtggataacatatggtatatagccagactgtacagacatgtttaaaaaaacacactgcttaacctattaaatatgtgtttagaattttataagcaaatataaatactgtaaaaagtcactttattttatttttcagcattatgtacataaatatgaagaggaaattatcttcaggttgatatcacaatcacttttcttactttctgtccatagtactttttcatgaaagaaatttgctaaataagacatgaaaacaagactgggtagttgtagatttctgctttttaaattacatttgctaattttagattatttcacaattttaaggagcaaaataggttcacgattcatatccaaattatgctttgcaattggaaaagggtttaaaattttatttatatttctggtagtacctgtactaactgaattgaaggtagtgcttatgttatttttgttctttttttctgacttcggtttatgttttcatttctttggagtaatgctgctctagattgttctaaatagaatgtgggcttcataatttttttttccacaaaaacagagtagtcaacttatatagtcaattacatcaggacattttgtgtttcttacagaagcaaaccataggctcctcttttccttaaaactacttagataaactgtattcgtgaactgcatgctggaaaatgctactattatgctaaataatgctaaccaacatttaaaatgtgcaaaactaataaagattacattttttatttt

SEQ ID NO: 16 - DNA, 8381 bp, Homo sapiens
atactgcagaggtctctggtgcatgtgtgtatgtgtgcgtttgtgtgtgtttgtgtgtctgtgtgttctgccccagtgagactgcagcccttgtaaatactttgacaccttttgcaagaaggaatctgaacaattgcaactgaaggcacattgttatcatctcgtctttgggtgatgctgttcctcactgcagatggataattttccttttaatcaggaatttcatatgcagaataaatggtaattaaaatgtgcaggatgacaagatggagcaaacagtgcttgtaccaccaggacctgacagcttcaacttcttcaccagagaatctcttgcggctattgaaagacgcattgcagaagaaaaggcaaagaatcccaaaccagacaaaaaagatgacgacgaaaatggcccaaagccaaatagtgacttggaagctggaaagaaccttccatttatttatggagacattcctccagagatggtgtcagagcccctggaggacctggacccctactatatcaataagaaaacttttatagtattgaataaattgaaggccatcttccggttcagtgccacctctgccctgtacattttaactcccttcaatcctcttaggaaaatagctattaagattttggtacattcattattcagcatgctaattatgtgcactattttgacaaactgtgtgtttatgacaatgagtaaccctcctgattggacaaagaatgtagaatacaccttcacaggaatatatacttttgaatcacttataaaaattattgcaaggggattctgtttagaagattttactttccttcgggatccatggaactggctcgatttcactgtcattacatttgcgtacgtcacagagtttgtggacctgggcaatgtctcggcattgagaacattcagagttctccgagcattgaagacgatttcagtcattccaggcctgaaaaccattgtgggagccctgatccagtctgtgaagaagctctcagatgtaatgatcctgactgtgttctgtctgagcgtatttgctctaattgggctgcagctgttcatgggcaacctgaggaataaatgtatacaatggcctcccaccaatgcttccttggaggaacatagtatagaaaagaatataactgtgaattataatggtacacttataaatgaaactgtctttgagtttgactggaagtcatatattcaagattcaagatatcattatttcctggagggttttttagatgcactactatgtggaaatagctctgatgcaggccaatgtccagagggatatatgtgtgtgaaagctggtagaaatcccaattatggctacacaagctttgataccttcagttgggcttttttgtccttgtttcgactaatgactcaggacttctgggaaaatctttatcaactgacattacgtgctgctgggaaaacgtacatgatattttttgtattggtcattttcttgggctcattctacctaataaatttgatcctggctgtggtggccatggcctacgaggaacagaatcaggccaccttggaagaagcagaacagaaagaggccgaatttcagcagatgattgaacagcttaaaaagcaacaggaggcagctcagcaggcagcaacggcaactgcctcagaacattccagagagcccagtgcagcaggcaggctctcagacagctcatctgaagcctctaagttgagttccaagagtgctaaggaaagaagaaatcggaggaagaaaagaaaacagaaagagcagtctggtggggaagagaaagatgaggatgaattccaaaaatctgaatctgaggacagcatcaggaggaaaggttttcgcttctccattgaagggaaccgattgacatatgaaaagaggtactcctccccacaccagtctttgttgagcatccgtggctccctattttcaccaaggcgaaatagcagaacaagccttttcagctttagagggcgagcaaaggatgtgggatctgagaacgacttcgcagatgatgagcacagcacctttgaggataacgagagccgtagagattccttgtttgtgccccgacgacacggagagagacgcaacagcaacctgagtcagaccagtaggtcatcccggatgctggcagtgtttccagcgaatgggaagatgcacagcactgtggattgcaatggtgtggtttccttggttggtggaccttcagttcctacatcgcctgttggacagcttctgccagaggtgataatagataagccagctactgatgacaatggaacaaccactgaaactgaaatgagaaagagaaggtcaagttctttccacgtttccatggactttctagaagatccttcccaaaggcaacgagcaatgagtatagccagcattctaacaaatacagtagaagaacttgaagaatccaggcagaaatgcccaccctgttggtataaattttccaacatattcttaatctgggactgttctccatattggttaaaagtgaaacatgttgtcaacctggttgtgatggacccatttgttgacctggccatcaccatctgtattgtcttaaatactcttttcatggccatggagcactatccaatgacggaccatttcaataatgtgcttacagtaggaaacttggttttcactgggatctttacagcagaaatgtttctgaaaattattgccatggatccttactattatttccaagaaggctggaatatctttgacggttttattgtgacgcttagcctggtagaacttggactcgccaatgtggaaggattatctgttctccgttcatttcgattgctgcgagttttcaagttggcaaaatcttggccaacgttaaatatgctaataaagatcatcggcaattccgtgggggctctgggaaatttaaccctcgtcttggccatcatcgtcttcatttttgccgtggtcggcatgcagctctttggtaaaagctacaaagattgtgtctgcaagatcgccagtgattgtcaactcccacgctggcacatgaatgacttcttccactccttcctgattgtgttccgcgtgctgtgtggggagtggatagagaccatgtgggactgtatggaggttgctggtcaagccatgtgccttactgtcttcatgatggtcatggtgattggaaacctagtggtcctgaatctctttctggccttgcttctgagctcatttagtgcagacaaccttgcagccactgatgatgataatgaaatgaataatctccaaattgctgtggataggatgcacaaaggagtagcttatgtgaaaagaaaaatatatgaatttattcaacagtccttcattaggaaacaaaagattttagatgaaattaaaccacttgatgatctaaacaacaagaaagacagttgtatgtccaatcatacaacagaaattgggaaagatcttgactatcttaaagatgtaaatggaactacaagtggtataggaactggcagcagtgttgaaaaatacattattgatgaaagtgattacatgtcattcataaacaaccccagtcttactgtgactgtaccaattgctgtaggagaatctgactttgaaaatttaaacacggaagactttagtagtgaatcggatctggaagaaagcaaagagaaactgaatgaaagcagtagctcatcagaaggtagcactgtggacatcggcgcacctgtagaagaacagcccgtagtggaacctgaagaaactcttgaaccagaagcttgtttcactgaaggctgtgtacaaagattcaagtgttgtcaaatcaatgtggaagaaggcagaggaaaacaatggtggaacctgagaaggacgtgtttccgaatagttgaacataactggtttgagaccttcattgttttcatgattctccttagtagtggtgctctggcatttgaagatatatatattgatcagcgaaagacgattaagacgatgttggaatatgctgacaaggttttcacttacattttcattctggaaatgcttctaaaatgggtggcatatggctatcaaacatatttcaccaatgcctggtgttggctggacttcttaattgttgatgtttcattggtcagtttaacagcaaatgccttgggttactcagaacttggagccatcaaatctctcaggacactaagagctctgagacctctaagagccttatctcgatttgaagggatgagggtggttgtgaatgcccttttaggagcaattccatccatcatgaatgtgcttctggtttgtcttatattctggctaattttcagcatcatgggcgtaaatttgtttgctggcaaattctaccactgtattaacaccacaactggtgacaggtttgacatcgaagacgtgaataatcatactgattgcctaaaactaatagaaagaaatgagactgctcgatggaaaaatgtgaaagtaaactttgataatgtaggatttgggtatctctctttgcttcaagttgccacattcaaaggatggatggatataatgtatgcagcagttgattccagaaatgtggaactccagcctaagtatgaaaaaagtctgtacatgtatctttactttgttattttcatcatctttgggtccttcttcaccttgaacctgtttattggtgtcatcatagataatttcaaccagcagaaaaagaagtttggaggtcaagacatctttatgacagaagaacagaagaaatactataatgcaatgaaaaaattaggatcgaaaaaaccgcaaaagcctatacctcgaccaggaaacaaatttcaaggaatggtctttgacttcgtaaccagacaagtttttgacataagcatcatgattctcatctgtcttaacatggtcacaatgatggtggaaacagatgaccagagtgaatatgtgactaccattttgtcacgcatcaatctggtgttcattgtgctatttactggagagtgtgtactgaaactcatctctctacgccattaatattttaccattggatggaatatttttgattttgtggttgtcattctctccattgtaggtatgtttcttgccgagctgatagaaaagtatttcgtgtcccctaccctgttccgagtgatccgtcttgctaggattggccgaatcctacgtctgatcaaaggagcaaaggggatccgcacgctgctctttgctttgatgatgtcccttcctgcgttgtttaacatcggcctcctactcttcctagtcatgttcatctacgccatctttgggatgtccaactttgcctatgttaagagggaagttgggatcgatgacatgttcaactttgagacctttggcaacagcatgatctgcctattccaaattacaacctctgctggctgggatggattgctagcacccattctcaacagtaagccacccgactgtgaccctaataaagttaaccctggaagctcagttaagggagactgtgggaacccatctgttggaattttcttttttgtcagttacatcatcatatccttcctggttgtggtgaacatgtacatcgcggtcatcctggagaacttcagtgttgctactgaagaaagtgcagagcctctgagtgaggatgactttgagatgttctatgaggtttgggagaagtttgatcccgatgcaactcagttcatggaatttgaaaaattatctcagtttgcagctgcgcttgaaccgcctctcaatctgccacaaccaaacaaactccagctcattgccatggatttgcccatggtgagtggtgaccggatccactgtcttgatatcttatttgcttttacaaagcgggttctaggagagagtggagagatggatgctctacgaatacagatggaagagcgattcatggcttccaatccttccaaggtctcctatcagccaatcactactactttaaaacgaaaacaagaggaagtatctgctgtcattattcagcgtgcttacagacgccaccttttaaagcgaactgtaaaacaagcttcctttacgtacaataaaaacaaaatcaaaggtggggctaatcttcttataaaagaagacatgataattgacagaataaatgaaaactctattacagaaaaaactgatctgaccatgtccactgcagcttgtccaccttcctatgaccgggtgacaaagccaattgtggaaaaacatgagcaagaaggcaaagatgaaaaagccaaagggaaataaatgaaaataaataaaaataattgggtgacaaattgtttacagcctgtgaaggtgatgtatttttatcaacaggactcctttaggaggtcaatgccaaactgactgtttttacacaaatctccttaaggtcagtgcctacaataagacagtgaccccttgtcagcaaactgtgactctgtgtaaaggggagatgaccttgacaggaggttactgttctcactaccagctgacactgctgaagataagatgcacaatggctagtcagactgtagggaccagtttcaaggggtgcaaacctgtgattttggggttgtttaacatgaaacactttagtgtagtaattgtatccactgtttgcatttcaactgccacatttgtcacatttttatggaatctgttagtggattcatctttttgttaatccatgtgtttattatatgtgactatttttgtaaacgaagtttctgttgagaaataggctaaggacctctataacaggtatgccacctggggggtatggcaaccacatggccctcccagctacacaaagtcgtggtttgcatgagggcatgctgcacttagagatcatgcatgagaaaaagtcacaagaaaaacaaattcttaaatttcaccatatttctgggaggggtaattgggtgataagtggaggtgctttgttgatcttgttttgcgaaatccagcccctagaccaagtagattatttgtgggtaggccagtaaatcttagcaggtgcaaacttcattcaaatgtttggagtcataaatgttatgtttctttttgttgtattaaaaaaaaaacctgaatagtgaatattgcccctcaccctccaccgccagaagactgaattgaccaaaattactctttataaatttctgctttttcctgcactttgtttagccatctttgggctctcagcaaggttgacactgtatatgttaatgaaatgctatttattatgtaaatagtcattttaccctgtggtgcacgtttgagcaaacaaataatgacctaagcacagtatttattgcatcaaatatgtaccacaagaaatgtagagtgcaagctttacacaggtaataaaatgtattctgtaccatttatagatagtttggatgctatcaatgcatgtttatattaccatgctgctgtatctggtttctctcactgctcagaatctcatttatgagaaaccatatgtcagtggtaaagtcaaggaaattgttcaacagatctcatttatttaagtcattaagcaatagtttgcagcactttaacagctttttggttatttttacattttaagtggataacatatggtatatagccagactgtacagacatgtttaaaaaaacacactgcttaacctattaaatatgtgtttagaattttataagcaaatataaatactgtaaaaagtcactttattttatttttcagcattatgtacataaatatgaagaggaaattatcttcaggttgatatcacaatcacttttcttactttctgtccatagtactttttcatgaaagaaatttgctaaataagacatgaaaacaagactgggtagttgtagatttctgctttttaaattacatttgctaattttagattatttcacaattttaaggagcaaaataggttcacgattcatatccaaattatgctttgcaattggaaaagggtttaaaattttatttatatttctggtagtacctgtactaactgaattgaaggtagtgcttatgttatttttgttctttttttctgacttcggtttatgttttcatttctttggagtaatgctgctctagattgttctaaatagaatgtgggcttcataatttttttttccacaaaaacagagtagtcaacttatatagtcaattacatcaggacattttgtgtttcttacagaagcaaaccataggctcctcttttccttaaaactacttagataaactgtattcgtgaactgcatgctggaaaatgctactattatgctaaataatgctaaccaacatttaaaatgtgcaaaactaataaagattacattttttatttt

SEQ ID NO: 17 - DNA, 8381 bp, Homo sapiens
atactgcagaggtctctggtgcatgtgtgtatgtgtgcgtttgtgtgtgtttgtgtgtctgtgtgttctgccccagtgagactgcagcccttgtaaatactttgacaccttttgcaagaaggaatctgaacaattgcaactgaaggcacattgttatcatctcgtctttgggtgatgctgttcctcactgcagatggataattttccttttaatcaggaatttcatatgcagaataaatggtaattaaaatgtgcaggatgacaagatggagcaaacagtgcttgtaccaccaggacctgacagcttcaacttcttcaccagagaatctcttgcggctattgaaagacgcattgcagaagaaaaggcaaagaatcccaaaccagacaaaaaagatgacgacgaaaatggcccaaagccaaatagtgacttggaagctggaaagaaccttccatttatttatggagacattcctccagagatggtgtcagagcccctggaggacctggacccctactatatcaataagaaaacttttatagtattgaataaattgaaggccatcttccggttcagtgccacctctgccctgtacattttaactcccttcaatcctcttaggaaaatagctattaagattttggtacattcattattcagcatgctaattatgtgcactattttgacaaactgtgtgtttatgacaatgagtaaccctcctgattggacaaagaatgtagaatacaccttcacaggaatatatacttttgaatcacttataaaaattattgcaaggggattctgtttagaagattttactttccttcgggatccatggaactggctcgatttcactgtcattacatttgcgtacgtcacagagtttgtggacctgggcaatgtctcggcattgagaacattcagagttctccgagcattgaagacgatttcagtcattccaggcctgaaaaccattgtgggagccctgatccagtctgtgaagaagctctcagatgtaatgatcctgactgtgttctgtctgagcgtatttgctctaattgggctgcagctgttcatgggcaacctgaggaataaatgtatacaatggcctcccaccaatgcttccttggaggaacatagtatagaaaagaatataactgtgaattataatggtacacttataaatgaaactgtctttgagtttgactggaagtcatatattcaagattcaagatatcattatttcctggagggttttttagatgcactactatgtggaaatagctctgatgcaggccaatgtccagagggatatatgtgtgtgaaagctggtagaaatcccaattatggctacacaagctttgataccttcagttgggcttttttgtccttgtttcgactaatgactcaggacttctgggaaaatctttatcaactgacattacgtgctgctgggaaaacgtacatgatattttttgtattggtcattttcttgggctcattctacctaataaatttgatcctggctgtggtggccatggcctacgaggaacagaatcaggccaccttggaagaagcagaacagaaagaggccgaatttcagcagatgattgaacagcttaaaaagcaacaggaggcagctcagcaggcagcaacggcaactgcctcagaacattccagagagcccagtgcagcaggcaggctctcagacagctcatctgaagcctctaagttgagttccaagagtgctaaggaaagaagaaatcggaggaagaaaagaaaacagaaagagcagtctggtggggaagagaaagatgaggatgaattccaaaaatctgaatctgaggacagcatcaggaggaaaggttttcgcttctccattgaagggaaccgattgacatatgaaaagaggtactcctccccacaccagtctttgttgagcatccgtggctccctattttcaccaaggcgaaatagcagaacaagccttttcagctttagagggcgagcaaaggatgtgggatctgagaacgacttcgcagatgatgagcacagcacctttgaggataacgagagccgtagagattccttgtttgtgccccgacgacacggagagagacgcaacagcaacctgagtcagaccagtaggtcatcccggatgctggcagtgtttccagcgaatgggaagatgcacagcactgtggattgcaatggtgtggtttccttggttggtggaccttcagttcctacatcgcctgttggacagcttctgccagaggtgataatagataagccagctactgatgacaatggaacaaccactgaaactgaaatgagaaagagaaggtcaagttctttccacgtttccatggactttctagaagatccttcccaaaggcaacgagcaatgagtatagccagcattctaacaaatacagtagaagaacttgaagaatccaggcagaaatgcccaccctgttggtataaattttccaacatattcttaatctgggactgttctccatattggttaaaagtgaaacatgttgtcaacctggttgtgatggacccatttgttgacctggccatcaccatctgtattgtcttaaatactcttttcatggccatggagcactatccaatgacggaccatttcaataatgtgcttacagtaggaaacttggttttcactgggatctttacagcagaaatgtttctgaaaattattgccatggatccttactattatttccaagaaggctggaatatctttgacggttttattgtgacgcttagcctggtagaacttggactcgccaatgtggaaggattatctgttctccgttcatttcgattgctgcgagttttcaagttggcaaaatcttggccaacgttaaatatgctaataaagatcatcggcaattccgtgggggctctgggaaatttaaccctcgtcttggccatcatcgtcttcatttttgccgtggtcggcatgcagctctttggtaaaagctacaaagattgtgtctgcaagatcgccagtgattgtcaactcccacgctggcacatgaatgacttcttccactccttcctgattgtgttccgcgtgctgtgtggggagtggatagagaccatgtgggactgtatggaggttgctggtcaagccatgtgccttactgtcttcatgatggtcatggtgattggaaacctagtggtcctgaatctctttctggccttgcttctgagctcatttagtgcagacaaccttgcagccactgatgatgataatgaaatgaataatctccaaattgctgtggataggatgcacaaaggagtagcttatgtgaaaagaaaaatatatgaatttattcaacagtccttcattaggaaacaaaagattttagatgaaattaaaccacttgatgatctaaacaacaagaaagacagttgtatgtccaatcatacaacagaaattgggaaagatcttgactatcttaaagatgtaaatggaactacaagtggtataggaactggcagcagtgttgaaaaatacattattgatgaaagtgattacatgtcattcataaacaaccccagtcttactgtgactgtaccaattgctgtaggagaatctgactttgaaaatttaaacacggaagactttagtagtgaatcggatctggaagaaagcaaagagaaactgaatgaaagcagtagctcatcagaaggtagcactgtggacatcggcgcacctgtagaagaacagcccgtagtggaacctgaagaaactcttgaaccagaagcttgtttcactgaaggctgtgtacaaagattcaagtgttgtcaaatcaatgtggaagaaggcagaggaaaacaatggtggaacctgagaaggacgtgtttccgaatagttgaacataactggtttgagaccttcattgttttcatgattctccttagtagtggtgctctggcatttgaagatatatatattgatcagcgaaagacgattaagacgatgttggaatatgctgacaaggttttcacttacattttcattctggaaatgcttctaaaatgggtggcatatggctatcaaacatatttcaccaatgcctggtgttggctggacttcttaattgttgatgtttcattggtcagtttaacagcaaatgccttgggttactcagaacttggagccatcaaatctctcaggacactaagagctctgagacctctaagagccttatctcgatttgaagggatgagggtggttgtgaatgcccttttaggagcaattccatccatcatgaatgtgcttctggtttgtcttatattctggctaattttcagcatcatgggcgtaaatttgtttgctggcaaattctaccactgtattaacaccacaactggtgacaggtttgacatcgaagacgtgaataatcatactgattgcctaaaactaatagaaagaaatgagactgctcgatggaaaaatgtgaaagtaaactttgataatgtaggatttgggtatctctctttgcttcaagttgccacattcaaaggatggatggatataatgtatgcagcagttgattccagaaatgtggaactccagcctaagtatgaaaaaagtctgtacatgtatctttactttgttattttcatcatctttgggtccttcttcaccttgaacctgtttattggtgtcatcatagataatttcaaccagcagaaaaagaagtttggaggtcaagacatctttatgacagaagaacagaagaaatactataatgcaatgaaaaaattaggatcgaaaaaaccgcaaaagcctatacctcgaccaggaaacaaatttcaaggaatggtctttgacttcgtaaccagacaagtttttgacataagcatcatgattctcatctgtcttaacatggtcacaatgatggtggaaacagatgaccagagtgaatatgtgactaccattttgtcacgcatcaatctggtgttcattgtgctatttactggagagtgtgtactgaaactcatctctctacgccattattattttaccattggatggaatatttttgattttgtggttgtcattctctccattgtaggtatgtttcttgccgagctgatagaaaagtatttcgtgtcccctaccctgttccgagtgatccgtcttgctaggattggccgaatcctacgtctgatcaaaggagcaaaggggatccgcacgctgctctttgctttgatgatgtcccttcctgcgttgtttaacatcggcctcctactcttcctagtcatgttcatctacgccatctttgggatgtccaactttgcctatgttaagagggaagttgggatcgatgacatgttcaactttgagacctttggcaacagcatgatctgcctattccaaattacaacctctgctggctgggatggattgctagcacccattctcaacagtaagccacccgactgtgaccctaataaagttaaccctggaagctcagttaagggagactgtgggaacccatctgttggaattttcttttttgtcagttacatcatcatatccttcctggttgtggtgaacatgtacatcgcggtcatcctggagaacttcagtgttgctactgaagaaagtgcagagcctctgagtgaggatgactttgagatgttctatgaggtttgagagaagtttgatcccgatgcaactcagttcatggaatttgaaaaattatctcagtttgcagctgcgcttgaaccgcctctcaatctgccacaaccaaacaaactccagctcattgccatggatttgcccatggtgagtggtgaccggatccactgtcttgatatcttatttgcttttacaaagcgggttctaggagagagtggagagatggatgctctacgaatacagatggaagagcgattcatggcttccaatccttccaaggtctcctatcagccaatcactactactttaaaacgaaaacaagaggaagtatctgctgtcattattcagcgtgcttacagacgccaccttttaaagcgaactgtaaaacaagcttcctttacgtacaataaaaacaaaatcaaaggtggggctaatcttcttataaaagaagacatgataattgacagaataaatgaaaactctattacagaaaaaactgatctgaccatgtccactgcagcttgtccaccttcctatgaccgggtgacaaagccaattgtggaaaaacatgagcaagaaggcaaagatgaaaaagccaaagggaaataaatgaaaataaataaaaataattgggtgacaaattgtttacagcctgtgaaggtgatgtatttttatcaacaggactcctttaggaggtcaatgccaaactgactgtttttacacaaatctccttaaggtcagtgcctacaataagacagtgaccccttgtcagcaaactgtgactctgtgtaaaggggagatgaccttgacaggaggttactgttctcactaccagctgacactgctgaagataagatgcacaatggctagtcagactgtagggaccagtttcaaggggtgcaaacctgtgattttggggttgtttaacatgaaacactttagtgtagtaattgtatccactgtttgcatttcaactgccacatttgtcacatttttatggaatctgttagtggattcatctttttgttaatccatgtgtttattatatgtgactatttttgtaaacgaagtttctgttgagaaataggctaaggacctctataacaggtatgccacctggggggtatggcaaccacatggccctcccagctacacaaagtcgtggtttgcatgagggcatgctgcacttagagatcatgcatgagaaaaagtcacaagaaaaacaaattcttaaatttcaccatatttctgggaggggtaattgggtgataagtggaggtgctttgttgatcttgttttgcgaaatccagcccctagaccaagtagattatttgtgggtaggccagtaaatcttagcaggtgcaaacttcattcaaatgtttggagtcataaatgttatgtttctttttgttgtattaaaaaaaaaacctgaatagtgaatattgcccctcaccctccaccgccagaagactgaattgaccaaaattactctttataaatttctgctttttcctgcactttgtttagccatctttgggctctcagcaaggttgacactgtatatgttaatgaaatgctatttattatgtaaatagtcattttaccctgtggtgcacgtttgagcaaacaaataatgacctaagcacagtatttattgcatcaaatatgtaccacaagaaatgtagagtgcaagctttacacaggtaataaaatgtattctgtaccatttatagatagtttggatgctatcaatgcatgtttatattaccatgctgctgtatctggtttctctcactgctcagaatctcatttatgagaaaccatatgtcagtggtaaagtcaaggaaattgttcaacagatctcatttatttaagtcattaagcaatagtttgcagcactttaacagctttttggttatttttacattttaagtggataacatatggtatatagccagactgtacagacatgtttaaaaaaacacactgcttaacctattaaatatgtgtttagaattttataagcaaatataaatactgtaaaaagtcactttattttatttttcagcattatgtacataaatatgaagaggaaattatcttcaggttgatatcacaatcacttttcttactttctgtccatagtactttttcatgaaagaaatttgctaaataagacatgaaaacaagactgggtagttgtagatttctgctttttaaattacatttgctaattttagattatttcacaattttaaggagcaaaataggttcacgattcatatccaaattatgctttgcaattggaaaagggtttaaaattttatttatatttctggtagtacctgtactaactgaattgaaggtagtgcttatgttatttttgttctttttttctgacttcggtttatgttttcatttctttggagtaatgctgctctagattgttctaaatagaatgtgggcttcataatttttttttccacaaaaacagagtagtcaacttatatagtcaattacatcaggacattttgtgtttcttacagaagcaaaccataggctcctcttttccttaaaactacttagataaactgtattcgtgaactgcatgctggaaaatgctactattatgctaaataatgctaaccaacatttaaaatgtgcaaaactaataaagattacattttttatttt

SEQ ID NO: 18 - DNA, 8381 bp, Homo sapiens
atactgcagaggtctctggtgcatgtgtgtatgtgtgcgtttgtgtgtgtttgtgtgtctgtgtgttctgccccagtgagactgcagcccttgtaaatactttgacaccttttgcaagaaggaatctgaacaattgcaactgaaggcacattgttatcatctcgtctttgggtgatgctgttcctcactgcagatggataattttccttttaatcaggaatttcatatgcagaataaatggtaattaaaatgtgcaggatgacaagatggagcaaacagtgcttgtaccaccaggacctgacagcttcaacttcttcaccagagaatctcttgcggctattgaaagacgcattgcagaagaaaaggcaaagaatcccaaaccagacaaaaaagatgacgacgaaaatggcccaaagccaaatagtgacttggaagctggaaagaaccttccatttatttatggagacattcctccagagatggtgtcagagcccctggaggacctggacccctactatatcaataagaaaacttttatagtattgaataaattgaaggccatcttccggttcagtgccacctctgccctgtacattttaactcccttcaatcctcttaggaaaatagctattaagattttggtacattcattattcagcatgctaattatgtgcactattttgacaaactgtgtgtttatgacaatgagtaaccctcctgattggacaaagaatgtagaatacaccttcacaggaatatatacttttgaatcacttataaaaattattgcaaggggattctgtttagaagattttactttccttcgggatccatggaactggctcgatttcactgtcattacatttgcgtacgtcacagagtttgtggacctgggcaatgtctcggcattgagaacattcagagttctccgagcattgaagacgatttcagtcattccaggcctgaaaaccattgtgggagccctgatccagtctgtgaagaagctctcagatgtaatgatcctgactgtgttctgtctgagcgtatttgctctaattgggctgcagctgttcatgggcaacctgaggaataaatgtatacaatggcctcccaccaatgcttccttggaggaacatagtatagaaaagaatataactgtgaattataatggtacacttataaatgaaactgtctttgagtttgactggaagtcatatattcaagattcaagatatcattatttcctggagggttttttagatgcactactatgtggaaatagctctgatgcaggccaatgtccagagggatatatgtgtgtgaaagctggtagaaatcccaattatggctacacaagctttgataccttcagttgggcttttttgtccttgtttcgactaatgactcaggacttctgggaaaatctttatcaactgacattacgtgctgctgggaaaacgtacatgatattttttgtattggtcattttcttgggctcattctacctaataaatttgatcctggctgtggtggccatggcctacgaggaacagaatcaggccaccttggaagaagcagaacagaaagaggccgaatttcagcagatgattgaacagcttaaaaagcaacaggaggcagctcagcaggcagcaacggcaactgcctcagaacattccagagagcccagtgcagcaggcaggctctcagacagctcatctgaagcctctaagttgagttccaagagtgctaaggaaagaagaaatcggaggaagaaaagaaaacagaaagagcagtctggtggggaagagaaagatgaggatgaattccaaaaatctgaatctgaggacagcatcaggaggaaaggttttcgcttctccattgaagggaaccgattgacatatgaaaagaggtactcctccccacaccagtctttgttgagcatccgtggctccctattttcaccaaggcgaaatagcagaacaagccttttcagctttagagggcgagcaaaggatgtgggatctgagaacgacttcgcagatgatgagcacagcacctttgaggataacgagagccgtagagattccttgtttgtgccccgacgacacggagagagacgcaacagcaacctgagtcagaccagtaggtcatcccggatgctggcagtgtttccagcgaatgggaagatgcacagcactgtggattgcaatggtgtggtttccttggttggtggaccttcagttcctacatcgcctgttggacagcttctgccagaggtgataatagataagccagctactgatgacaatggaacaaccactgaaactgaaatgagaaagagaaggtcaagttctttccacgtttccatggactttctagaagatccttcccaaaggcaacgagcaatgagtatagccagcattctaacaaatacagtagaagaacttgaagaatccaggcagaaatgcccaccctgttggtataaattttccaacatattcttaatctgggactgttctccatattggttaaaagtgaaacatgttgtcaacctggttgtgatggacccatttgttgacctggccatcaccatctgtattgtcttaaatactcttttcatggccatggagcactatccaatgacggaccatttcaataatgtgcttacagtaggaaacttggttttcactgggatctttacagcagaaatgtttctgaaaattattgccatggatccttactattatttccaagaaggctggaatatctttgacggttttattgtgacgcttagcctggtagaacttggactcgccaatgtggaaggattatctgttctccgttcatttcgattgctgcgagttttcaagttggcaaaatcttggccaacgttaaatatgctaataaagatcatcggcaattccgtgggggctctgggaaatttaaccctcgtcttggccatcatcgtcttcatttttgccgtggtcggcatgcagctctttggtaaaagctacaaagattgtgtctgcaagatcgccagtgattgtcaactcccacgctggcacatgaatgacttcttccactccttcctgattgtgttccgcgtgctgtgtggggagtggatagagaccatgtgggactgtatggaggttgctggtcaagccatgtgccttactgtcttcatgatggtcatggtgattggaaacctagtggtcctgaatctctttctggccttgcttctgagctcatttagtgcagacaaccttgcagccactgatgatgataatgaaatgaataatctccaaattgctgtggataggatgcacaaaggagtagcttatgtgaaaagaaaaatatatgaatttattcaacagtccttcattaggaaacaaaagattttagatgaaattaaaccacttgatgatctaaacaacaagaaagacagttgtatgtccaatcatacaacagaaattgggaaagatcttgactatcttaaagatgtaaatggaactacaagtggtataggaactggcagcagtgttgaaaaatacattattgatgaaagtgattacatgtcattcataaacaaccccagtcttactgtgactgtaccaattgctgtaggagaatctgactttgaaaatttaaacacggaagactttagtagtgaatcggatctggaagaaagcaaagagaaactgaatgaaagcagtagctcatcagaaggtagcactgtggacatcggcgcacctgtagaagaacagcccgtagtggaacctgaagaaactcttgaaccagaagcttgtttcactgaaggctgtgtacaaagattcaagtgttgtcaaatcaatgtggaagaaggcagaggaaaacaatggtggaacctgagaaggacgtgtttccgaatagttgaacataactggtttgagaccttcattgttttcatgattctccttagtagtggtgctctggcatttgaagatatatatattgatcagcgaaagacgattaagacgatgttggaatatgctgacaaggttttcacttacattttcattctggaaatgcttctaaaatgggtggcatatggctatcaaacatatttcaccaatgcctggtgttggctggacttcttaattgttgatgtttcattggtcagtttaacagcaaatgccttgggttactcagaacttggagccatcaaatctctcaggacactaagagctctgagacctctaagagccttatctcgatttgaagggatgagggtggttgtgaatgcccttttaggagcaattccatccatcatgaatgtgcttctggtttgtcttatattctggctaattttcagcatcatgggcgtaaatttgtttgctggcaaattctaccactgtattaacaccacaactggtgacaggtttgacatcgaagacgtgaataatcatactgattgcctaaaactaatagaaagaaatgagactgctcgatggaaaaatgtgaaagtaaactttgataatgtaggatttgggtatctctctttgcttcaagttgccacattcaaaggatggatggatataatgtatgcagcagttgattccagaaatgtggaactccagcctaagtatgaaaaaagtctgtacatgtatctttactttgttattttcatcatctttgggtccttcttcaccttgaacctgtttattggtgtcatcatagataatttcaaccagcagaaaaagaagtttggaggtcaagacatctttatgacagaagaacagaagaaatactataatgcaatgaaaaaattaggatcgaaaaaaccgcaaaagcctatacctcgaccaggaaacaaatttcaaggaatggtctttgacttcgtaaccagacaagtttttgacataagcatcatgattctcatctgtcttaacatggtcacaatgatggtggaaacagatgaccagagtgaatatgtgactaccattttgtcacgcatcaatctggtgttcattgtgctatttactggagagtgtgtactgaaactcatctctctacgccattattattttaccattggatggaatatttttgattttgtggttgtcattctctccattgtaggtatgtttcttgccgagctgatagaaaagtatttcgtgtcccctaccctgttccgagtgatccgtcttgctaggattggccgaatcctacgtctgatcaaaggagcaaaggggatccgcacgctgctctttgctttgatgatgtcccttcctgcgttgtttaacatcggcctcctactcttcctagtcatgttcatctacgccatctttgggatgtccaactttgcctatgttaagagggaagttgggatcgatgacatgttcaactttgagacctttggcaacagcatgatctgcctattccaaattacaacctctgctggctgggatggattgctagcacccattctcaacagtaagccacccgactgtgaccctaataaagttaaccctggaagctcagttaagggagactgtgggaacccatctgttggaattttcttttttgtcagttacatcatcatatccttcctggttgtggtgaacatgtacatcgcggtcatcctggagaacttcagtgttgctactgaagaaagtgcagagcctctgagtgaggatgactttgagatgttctatgaggtttgggagaagtttgatcccgatgcaactcagttcatggaatttgaaaaattatctcagtttgcagctgcgcttgaaccgcctctcaatctgccacaaccaaacaaactccagctcattgccatggatttgcccatggtgagtggtgaccggatccactgtcttgatatcttatttgcttttacaaagcgggttctaggagagagtggagagatggatgctctatgaatacagatggaagagcgattcatggcttccaatccttccaaggtctcctatcagccaatcactactactttaaaacgaaaacaagaggaagtatctgctgtcattattcagcgtgcttacagacgccaccttttaaagcgaactgtaaaacaagcttcctttacgtacaataaaaacaaaatcaaaggtggggctaatcttcttataaaagaagacatgataattgacagaataaatgaaaactctattacagaaaaaactgatctgaccatgtccactgcagcttgtccaccttcctatgaccgggtgacaaagccaattgtggaaaaacatgagcaagaaggcaaagatgaaaaagccaaagggaaataaatgaaaataaataaaaataattgggtgacaaattgtttacagcctgtgaaggtgatgtatttttatcaacaggactcctttaggaggtcaatgccaaactgactgtttttacacaaatctccttaaggtcagtgcctacaataagacagtgaccccttgtcagcaaactgtgactctgtgtaaaggggagatgaccttgacaggaggttactgttctcactaccagctgacactgctgaagataagatgcacaatggctagtcagactgtagggaccagtttcaaggggtgcaaacctgtgattttggggttgtttaacatgaaacactttagtgtagtaattgtatccactgtttgcatttcaactgccacatttgtcacatttttatggaatctgttagtggattcatctttttgttaatccatgtgtttattatatgtgactatttttgtaaacgaagtttctgttgagaaataggctaaggacctctataacaggtatgccacctggggggtatggcaaccacatggccctcccagctacacaaagtcgtggtttgcatgagggcatgctgcacttagagatcatgcatgagaaaaagtcacaagaaaaacaaattcttaaatttcaccatatttctgggaggggtaattgggtgataagtggaggtgctttgttgatcttgttttgcgaaatccagcccctagaccaagtagattatttgtgggtaggccagtaaatcttagcaggtgcaaacttcattcaaatgtttggagtcataaatgttatgtttctttttgttgtattaaaaaaaaaacctgaatagtgaatattgcccctcaccctccaccgccagaagactgaattgaccaaaattactctttataaatttctgctttttcctgcactttgtttagccatctttgggctctcagcaaggttgacactgtatatgttaatgaaatgctatttattatgtaaatagtcattttaccctgtggtgcacgtttgagcaaacaaataatgacctaagcacagtatttattgcatcaaatatgtaccacaagaaatgtagagtgcaagctttacacaggtaataaaatgtattctgtaccatttatagatagtttggatgctatcaatgcatgtttatattaccatgctgctgtatctggtttctctcactgctcagaatctcatttatgagaaaccatatgtcagtggtaaagtcaaggaaattgttcaacagatctcatttatttaagtcattaagcaatagtttgcagcactttaacagctttttggttatttttacattttaagtggataacatatggtatatagccagactgtacagacatgtttaaaaaaacacactgcttaacctattaaatatgtgtttagaattttataagcaaatataaatactgtaaaaagtcactttattttatttttcagcattatgtacataaatatgaagaggaaattatcttcaggttgatatcacaatcacttttcttactttctgtccatagtactttttcatgaaagaaatttgctaaataagacatgaaaacaagactgggtagttgtagatttctgctttttaaattacatttgctaattttagattatttcacaattttaaggagcaaaataggttcacgattcatatccaaattatgctttgcaattggaaaagggtttaaaattttatttatatttctggtagtacctgtactaactgaattgaaggtagtgcttatgttatttttgttctttttttctgacttcggtttatgttttcatttctttggagtaatgctgctctagattgttctaaatagaatgtgggcttcataatttttttttccacaaaaacagagtagtcaacttatatagtcaattacatcaggacattttgtgtttcttacagaagcaaaccataggctcctcttttccttaaaactacttagataaactgtattcgtgaactgcatgctggaaaatgctactattatgctaaataatgctaaccaacatttaaaatgtgcaaaactaataaagattacattttttatttt

SEQ ID NO: 19 - DNA, 8381 bp, Homo sapiens
atactgcagaggtctctggtgcatgtgtgtatgtgtgcgtttgtgtgtgtttgtgtgtctgtgtgttctgccccagtgagactgcagcccttgtaaatactttgacaccttttgcaagaaggaatctgaacaattgcaactgaaggcacattgttatcatctcgtctttgggtgatgctgttcctcactgcagatggataattttccttttaatcaggaatttcatatgcagaataaatggtaattaaaatgtgcaggatgacaagatggagcaaacagtgcttgtaccaccaggacctgacagcttcaacttcttcaccagagaatctcttgcggctattgaaagacgcattgcagaagaaaaggcaaagaatcccaaaccagacaaaaaagatgacgacgaaaatggcccaaagccaaatagtgacttggaagctggaaagaaccttccatttatttatggagacattcctccagagatggtgtcagagcccctggaggacctggacccctactatatcaataagaaaacttttatagtattgaataaattgaaggccatcttccggttcagtgccacctctgccctgtacattttaactcccttcaatcctcttaggaaaatagctattaagattttggtacattcattattcagcatgctaattatgtgcactattttgacaaactgtgtgtttatgacaatgagtaaccctcctgattggacaaagaatgtagaatacaccttcacaggaatatatacttttgaatcacttataaaaattattgcaaggggattctgtttagaagattttactttccttcgggatccatggaactggctcgatttcactgtcattacatttgcgtacgtcacagagtttgtggacctgggcaatgtctcggcattgagaacattcagagttctccgagcattgaagacgatttcagtcattccaggcctgaaaaccattgtgggagccctgatccagtctgtgaagaagctctcagatgtaatgatcctgactgtgttctgtctgagcgtatttgctctaattgggctgcagctgttcatgggcaacctgaggaataaatgtatacaatggcctcccaccaatgcttccttggaggaacatagtatagaaaagaatataactgtgaattataatggtacacttataaatgaaactgtctttgagtttgactggaagtcatatattcaagattcaagatatcattatttcctggagggttttttagatgcactactatgtggaaatagctctgatgcaggccaatgtccagagggatatatgtgtgtgaaagctggtagaaatcccaattatggctacacaagctttgataccttcagttgggcttttttgtccttgtttcgactaatgactcaggacttctgggaaaatctttatcaactgacattacgtgctgctgggaaaacgtacatgatattttttgtattggtcattttcttgggctcattctacctaataaatttgatcctggctgtggtggccatggcctacgaggaacagaatcaggccaccttggaagaagcagaacagaaagaggccgaatttcagcagatgattgaacagcttaaaaagcaacaggaggcagctcagcaggcagcaacggcaactgcctcagaacattccagagagcccagtgcagcaggcaggctctcagacagctcatctgaagcctctaagttgagttccaagagtgctaaggaaagaagaaatcggaggaagaaaagaaaacagaaagagcagtctggtggggaagagaaagatgaggatgaattccaaaaatctgaatctgaggacagcatcaggaggaaaggttttcgcttctccattgaagggaaccgattgacatatgaaaagaggtactcctccccacaccagtctttgttgagcatccgtggctccctattttcaccaaggcgaaatagcagaacaagccttttcagctttagagggcgagcaaaggatgtgggatctgagaacgacttcgcagatgatgagcacagcacctttgaggataacgagagccgtagagattccttgtttgtgccccgacgacacggagagagacgcaacagcaacctgagtcagaccagtaggtcatcccggatgctggcagtgtttccagcgaatgggaagatgcacagcactgtggattgcaatggtgtggtttccttggttggtggaccttcagttcctacatcgcctgttggacagcttctgccagaggtgataatagataagccagctactgatgacaatggaacaaccactgaaactgaaatgagaaagagaaggtcaagttctttccacgtttccatggactttctagaagatccttcccaaaggcaacgagcaatgagtatagccagcattctaacaaatacagtagaagaacttgaagaatccaggcagaaatgcccaccctgttggtataaattttccaacatattcttaatctgggactgttctccatattggttaaaagtgaaacatgttgtcaacctggttgtgatggacccatttgttgacctggccatcaccatctgtattgtcttaaatactcttttcatggccatggagcactatccaatgacggaccatttcaataatgtgcttacagtaggaaacttggttttcactgggatctttacagcagaaatgtttctgaaaattattgccatggatccttactattatttccaagaaggctggaatatctttgacggttttattgtgacgcttagcctggtagaacttggactcgccaatgtggaaggattatctgttctccgttcatttcgattgctgcgagttttcaagttggcaaaatcttggccaacgttaaatatgctaataaagatcatcggcaattccgtgggggctctgggaaatttaaccctcgtcttggccatcatcgtcttcatttttgccgtggtcggcatgcagctctttggtaaaagctacaaagattgtgtctgcaagatcgccagtgattgtcaactcccacgctggcacatgaatgacttcttccactccttcctgattgtgttccgcgtgctgtgtggggagtggatagagaccatgtgggactgtatggaggttgctggtcaagccatgtgccttactgtcttcatgatggtcatggtgattggaaacctagtggtcctgaatctctttctggccttgcttctgagctcatttagtgcagacaaccttgcagccactgatgatgataatgaaatgaataatctccaaattgctgtggataggatgcacaaaggagtagcttatgtgaaaagaaaaatatatgaatttattcaacagtccttcattaggaaacaaaagattttagatgaaattaaaccacttgatgatctaaacaacaagaaagacagttgtatgtccaatcatacaacagaaattgggaaagatcttgactatcttaaagatgtaaatggaactacaagtggtataggaactggcagcagtgttgaaaaatacattattgatgaaagtgattacatgtcattcataaacaaccccagtcttactgtgactgtaccaattgctgtaggagaatctgactttgaaaatttaaacacggaagactttagtagtgaatcggatctggaagaaagcaaagagaaactgaatgaaagcagtagctcatcagaaggtagcactgtggacatcggcgcacctgtagaagaacagcccgtagtggaacctgaagaaactcttgaaccagaagcttgtttcactgaaggctgtgtacaaagattcaagtgttgtcaaatcaatgtggaagaaggcagaggaaaacaatggtggaacctgagaaggacgtgtttccgaatagttgaacataactggtttgagaccttcattgttttcatgattctccttagtagtggtgctctggcatttgaagatatatatattgatcagcgaaagacgattaagacgatgttggaatatgctgacaaggttttcacttacattttcattctggaaatgcttctaaaatgggtggcatatggctatcaaacatatttcaccaatgcctggtgttggctggacttcttaattgttgatgtttcattggtcagtttaacagcaaatgccttgggttactcagaacttggagccatcaaatctctcaggacactaagagctctgagacctctaagagccttatctcgatttgaagggatgagggtggttgtgaatgcccttttaggagcaattccatccatcatgaatgtgcttctggtttgtcttatattctggctaattttcagcatcatgggcgtaaatttgtttgctggcaaattctaccactgtattaacaccacaactggtgacaggtttgacatcgaagacgtgaataatcatactgattgcctaaaactaatagaaagaaatgagactgctcgatggaaaaatgtgaaagtaaactttgataatgtaggatttgggtatctctctttgcttcaagttgccacattcaaaggatggatggatataatgtatgcagcagttgattccagaaatgtggaactccagcctaagtatgaaaaaagtctgtacatgtatctttactttgttattttcatcatctttgggtccttcttcaccttgaacctgtttattggtgtcatcatagataatttcaaccagcagaaaaagaagtttggaggtcaagacatctttatgacagaagaacagaagaaatactataatgcaatgaaaaaattaggatcgaaaaaaccgcaaaagcctatacctcgaccaggaaacaaatttcaaggaatggtctttgacttcgtaaccagacaagtttttgacataagcatcatgattctcatctgtcttaacatggtcacaatgatggtggaaacagatgaccagagtgaatatgtgactaccattttgtcacgcatcaatctggtgttcattgtgctatttactggagagtgtgtactgaaactcatctctctacgccattattattttaccattggatggaatatttttgattttgtggttgtcattctctccattgtaggtatgtttcttgccgagctgatagaaaagtatttcgtgtcccctaccctgttccgagtgatccgtcttgctaggattggccgaatcctacgtctgatcaaaggagcaaaggggatccgcacgctgctctttgctttgatgatgtcccttcctgcgttgtttaacatcggcctcctactcttcctagtcatgttcatctacgccatctttgggatgtccaactttgcctatgttaagagggaagttgggatcgatgacatgttcaactttgagacctttggcaacagcatgatctgcctattccaaattacaacctctgctggctgggatggattgctagcacccattctcaacagtaagccacccgactgtgaccctaataaagttaaccctggaagctcagttaagggagactgtgggaacccatctgttggaattttcttttttgtcagttacatcatcatatccttcctggttgtggtgaacatgtacatcgcggtcatcctggagaacttcagtgttgctactgaagaaagtgcagagcctctgagtgaggatgactttgagatgttctatgaggtttgggagaagtttgatcccgatgcaactcagttcatggaatttgaaaaattatctcagtttgcagctgcgcttgaaccgcctctcaatctgccacaaccaaacaaactccagctcattgccatggatttgcccatggtgagtggtgaccggatccactgtcttgatatcttatttgcttttacaaagcgggttctaggagagagtggagagatggatgctctacgaatacagatggaagagcgattcatggcttccaatccttccaaggtctcctattagccaatcactactactttaaaacgaaaacaagaggaagtatctgctgtcattattcagcgtgcttacagacgccaccttttaaagcgaactgtaaaacaagcttcctttacgtacaataaaaacaaaatcaaaggtggggctaatcttcttataaaagaagacatgataattgacagaataaatgaaaactctattacagaaaaaactgatctgaccatgtccactgcagcttgtccaccttcctatgaccgggtgacaaagccaattgtggaaaaacatgagcaagaaggcaaagatgaaaaagccaaagggaaataaatgaaaataaataaaaataattgggtgacaaattgtttacagcctgtgaaggtgatgtatttttatcaacaggactcctttaggaggtcaatgccaaactgactgtttttacacaaatctccttaaggtcagtgcctacaataagacagtgaccccttgtcagcaaactgtgactctgtgtaaaggggagatgaccttgacaggaggttactgttctcactaccagctgacactgctgaagataagatgcacaatggctagtcagactgtagggaccagtttcaaggggtgcaaacctgtgattttggggttgtttaacatgaaacactttagtgtagtaattgtatccactgtttgcatttcaactgccacatttgtcacatttttatggaatctgttagtggattcatctttttgttaatccatgtgtttattatatgtgactatttttgtaaacgaagtttctgttgagaaataggctaaggacctctataacaggtatgccacctggggggtatggcaaccacatggccctcccagctacacaaagtcgtggtttgcatgagggcatgctgcacttagagatcatgcatgagaaaaagtcacaagaaaaacaaattcttaaatttcaccatatttctgggaggggtaattgggtgataagtggaggtgctttgttgatcttgttttgcgaaatccagcccctagaccaagtagattatttgtgggtaggccagtaaatcttagcaggtgcaaacttcattcaaatgtttggagtcataaatgttatgtttctttttgttgtattaaaaaaaaaacctgaatagtgaatattgcccctcaccctccaccgccagaagactgaattgaccaaaattactctttataaatttctgctttttcctgcactttgtttagccatctttgggctctcagcaaggttgacactgtatatgttaatgaaatgctatttattatgtaaatagtcattttaccctgtggtgcacgtttgagcaaacaaataatgacctaagcacagtatttattgcatcaaatatgtaccacaagaaatgtagagtgcaagctttacacaggtaataaaatgtattctgtaccatttatagatagtttggatgctatcaatgcatgtttatattaccatgctgctgtatctggtttctctcactgctcagaatctcatttatgagaaaccatatgtcagtggtaaagtcaaggaaattgttcaacagatctcatttatttaagtcattaagcaatagtttgcagcactttaacagctttttggttatttttacattttaagtggataacatatggtatatagccagactgtacagacatgtttaaaaaaacacactgcttaacctattaaatatgtgtttagaattttataagcaaatataaatactgtaaaaagtcactttattttatttttcagcattatgtacataaatatgaagaggaaattatcttcaggttgatatcacaatcacttttcttactttctgtccatagtactttttcatgaaagaaatttgctaaataagacatgaaaacaagactgggtagttgtagatttctgctttttaaattacatttgctaattttagattatttcacaattttaaggagcaaaataggttcacgattcatatccaaattatgctttgcaattggaaaagggtttaaaattttatttatatttctggtagtacctgtactaactgaattgaaggtagtgcttatgttatttttgttctttttttctgacttcggtttatgttttcatttctttggagtaatgctgctctagattgttctaaatagaatgtgggcttcataatttttttttccacaaaaacagagtagtcaacttatatagtcaattacatcaggacattttgtgtttcttacagaagcaaaccataggctcctcttttccttaaaactacttagataaactgtattcgtgaactgcatgctggaaaatgctactattatgctaaataatgctaaccaacatttaaaatgtgcaaaactaataaagattacattttttatttt

SEQ ID NO: 20 - DNA, 221 bp, Homo sapiens
taactttacaataatttattatgacaagtaacagaaagtagataacagagtttaagtggtttatactttcatacttctatgttgtgttcctgtcttacaaacttttatagtattgaataaagggaaggccatcttccggttcagtgccacctctgccctgtacattttaactcccttcaatcctcttaggaaaatagctattaagattttggtacattcat

SEQ ID NO: 21 - DNA, 164 bp, Homo sapiens
gatatcattatttcctggagggttttttagatgcactactatgtggaaatagctctgatgcaggttaagtcaataatttgtgtgtatctgtgtatatttgtatgtacacatacatatgtgtatcttttctctctttttatagaaactgaagataacagccaact

SEQ ID NO: 22 - DNA, 385 bp, Homo sapiens
caggcagcaacggcaactgcctcagaacattccagagagcccagtgcagcaggcaggctctcagacagctcatctgaagcctctaagttgagttccaagagtgctaaggaaagaagaaatcggaggaagaaaagaaaacagaaagagcagtctggtggggaagagaaagatgaggatgaattccaaaaatctgaatctgaggacagcatcaggaggaaaggttttcgcttctccattgaagggaaccgattgacatatgaaaagaggtactcctccccacaccaggcatggcactgctgagtttactgatgcatggttgaaaattaaaacatgggagagagggggagaattagaaaatggactcaggaatttttatcaactgaat

SEQ ID NO: 23 - DNA, 481 bp, Homo sapiens
tgaatgctgaaatctccttctacataatcttgcaaaatgaaatcacattcaaatgtccatattaatatgactttatttgtttgctctttcaaacttctactctttgttgagcatccgtggctccctattttcaccaaggcgaaatagcagaacaagccttttcagctttagagggcgagcaaaggatgtgggatctgagaacgacttcgcagatgatgagcacagcacctttgaggataacgagagccgtagagattccttgtttgtgccccgacgacacggagagagacgcaacagcaacctgagtcagaccagtaggtcatcccggatgctggcagtgtttccagcgaatgggaagatgcacagcactgtggattgcaatggtgtggtttccttggttggtggaccttcagttcctacatcgcctgttggacagcttctgccagaggtgataatagataagccagctactgatgacaat

SEQ ID NO: 24 - DNA, 274 bp, Homo sapiens
gttttcactgggatctttacagcagaaatgtttctgaaaattattgccatggatccttactattatttccaagaaggctggaatatctttgacggttttattgtgacgcttagcctggtagaacttggactcgccaatgtggaaggattatctgttctccgttcatttcgattggaaaaaaaaaaaaaaaaaagcaccaaattcaaaaacctttctaacaatcagggttcttgcatagcaatgtcatagtttttttgccacacaaccattagca

SEQ ID NO: 25 - DNA, 274 bp, Homo sapiens
gttttcactgggatctttacagcagaaatgtttctgaaaattattgccatggatccttactattatttccaagaaggctggaatatctttgacggttttattgtgacgcttagcctggtagaacttggactcgccaatgtggaaggattatctgttctccgttcatttcgattggttaaaaaaaaaaaaaaaagcaccaaattcaaaaacctttctaacaatcagggttcttgcatagcaatgtcatagtttttttgccacacaaccattagca

SEQ ID NO: 26 - DNA, 3362 bp, Homo sapiens
ttcaggactctgaaccttaccttggagctttagaagaaacatatgtttattttaacgcatgatttcttcactggttggtattctcagtgtttattcataggtatgtttcttgccgagctgatagaaaagtatttcgtgtcccctaccctgttccgagtgatccgtcttgctaggattggccgaatcctacgtctgatcaaaggagcaaaggggatccgcacgctgctctttgctttgatgatgtcccttcctgcgttgtttaacatcggcctcctactcttcctagtcatgttcatctacgccatctttgggatgtccaactttgcctatgttaagagggaagttgggatcgatgacatgttcaactttgagacctttggcaacagcatgatctgcctattccaaattacaacctctgctggctgggatggattgctagcacccattctcaacagtaagccacccgactgtgaccctaataaagttaaccctggaagctcagttaagggagactgtgggaacccatctgttggaattttcttttttgtcagttacatcatcatatccttcctggttgtggtgaacatgtacatcgcggtcatcctggagaacttcagtgttgctactgaagaaagtgcagagcctctgagtgaggatgactttgagatgttctatgaggtttgggagaagtttgatcccgatgcaactcagttcatggaatttgaaaaattatctcagtttgcagctgcgcttgaaccgcctctcaatctgccacaaccaaacaaactccagctcattgccatggatttgcccatggtgagtggtgaccggatccactgtcttgatatcttatttgcttttacaaagcgggttctaggagagagtggagagatggatgctctacgaatacagatggaagagcgattcatggcttccaatccttccaaggtctcctatcagccaatcactactactttaaaacgaaaacaagaggaagtatctgctgtcattattcagcgtgcttacagacgccaccttttaaagcgaactgtaaaacaagcttcctttacgtacaataaaaacaaaatcaaaggtggggctaatcttcttataaaagaagacatgataattgacagaataaatgaaaactctattacagaaaaaactgatctgaccatgtccactgcagcttgtccaccttcctatgaccgggtgacaaagccaattgtggaaaaacatgagcaagaaggcaaagatgaaaaagccaaagggaaataaatgaaaataaataaaaataattgggtgacaaattgtttacagcctgtgaaggtgatgtatttttatcaacaggactcctttaggaggtcaatgccaaactgactgtttttacacaaatctccttaaggtcagtgcctacaataagacagtgaccccttgtcagcaaactgtgactctgtgtaaaggggagatgaccttgacaggaggttactgttctcactaccagctgacactgctgaagataagatgcacaatggctagtcagactgtagggaccagtttcaaggggtgcaaacctgtgattttggggttgtttaacatgaaacactttagtgtagtaattgtatccactgtttgcatttcaactgccacatttgtcacatttttatggaatctgttagtggattcatctttttgttaatccatgtgtttattatatgtgactatttttgtaaacgaagtttctgttgagaaataggctaaggacctctataacaggtatgccacctggggggtatggcaaccacatggccctcccagctacacaaagtcgtggtttgcatgagggcatgctgcacttagagatcatgcatgagaaaaagtcacaagaaaaacaaattcttaaatttcaccatatttctgggaggggtaattgggtgataagtggaggtgctttgttgatcttgttttgcgaaatccagcccctagaccaagtagattatttgtgggtaggccagtaaatcttagcaggtgcaaacttcattcaaatgtttggagtcataaatgttatgtttctttttgttgtattaaaaaaaaaacctgaatagtgaatattgcccctcaccctccaccgccagaagactgaattgaccaaaattactctttataaatttctgctttttcctgcactttgtttagccatcttcggctctcagcaaggttgacactgtatatgttaatgaaatgctatttattatgtaaatagtcattttaccctgtggtgcacgtttgagcaaacaaataatgacctaagcacagtatttattgcatcaaatatgtaccacaagaaatgtagagtgcaagctttacacaggtaataaaatgtattctgtaccatttatagatagtttggatgctatcaatgcatgtttatattaccatgctgctgtatctggtttctctcactgctcagaatctcatttatgagaaaccatatgtcagtggtaaagtcaaggaaattgttcaacagatctcatttatttaagtcattaagcaatagtttgcagcactttaacagctttttggttatttttacattttaagtggataacatatggtatatagccagactgtacagacatgtttaaaaaaacacactgcttaacctattaaatatgtgtttagaattttataagcaaatataaatactgtaaaaagtcactttattttatttttcagcattatgtacataaatatgaagaggaaattatcttcaggttgatatcacaatcacttttcttactttctgtccatagtactttttcatgaaagaaatttgctaaataagacatgaaaacaagactgggtagttgtagatttctgctttttaaattacatttgctaattttagattatttcacaattttaaggagcaaaataggttcacgattcatatccaaattatgctttgcaattggaaaagggtttaaaattttatttatatttctggtagtacctgcactaactgaattgaaggtagtgcttatgttatttttgttctttttttctgacttcggtttatgttttcatttctttggagtaatgctgctctagattgttctaaatagaatgtgggcttcataatttttttttccacaaaaacagagtagtcaacttatatagtcaattacatcaggacattttgtgtttcttacagaagcaaaccataggctcctcttttccttaaaactacttagataaactgtattcgtgaactgcatgctggaaaatgctactattatgctaaataatgctaaccaacatttaaaatgtgcaaaactaataaagattacattttttatttt

SEQ ID NO: 27 - DNA, 8379 bp, Homo sapiens
atactgcagaggtctctggtgcatgtgtgtatgtgtgcgtttgtgtgtgtttgtgtgtctgtgtgttctgccccagtgagactgcagcccttgtaaatactttgacaccttttgcaagaaggaatctgaacaattgcaactgaaggcacattgttatcatctcgtctttgggtgatgctgttcctcactgcagatggataattttccttttaatcaggaatttcatatgcagaataaatggtaattaaaatgtgcaggatgacaagatggagcaaacagtgcttgtaccaccaggacctgacagcttcaacttcttcaccagagaatctcttgcggctattgaaagacgcattgcagaagaaaaggcaaagaatcccaaaccagacaaaaaagatgacgacgaaaatggcccaaagccaaatagtgacttggaagctggaaagaaccttccatttatttatggagacattcctccagagatggtgtcagagcccctggaggacctggacccctactatatcaataagaaaacttttatagtattgaataaattgaaggccatcttccggttcagtgccacctctgccctgtacattttaactcccttcaatcctcttaggaaaatagctattaagattttggtacattcattattcagcatgctaattatgtgcactattttgacaaactgtgtgtttatgacaatgagtaaccctcctgattggacaaagaatgtagaatacaccttcacaggaatatatacttttgaatcacttataaaaattattgcaaggggattctgtttagaagattttactttccttcgggatccatggaactggctcgatttcactgtcattacatttgcgtacgtcacagagtttgtggacctgggcaatgtctcggcattgagaacattcagagttctccgagcattgaagacgatttcagtcattccaggcctgaaaaccattgtgggagccctgatccagtctgtgaagaagctctcagatgtaatgatcctgactgtgttctgtctgagcgtatttgctctaattgggctgcagctgttcatgggcaacctgaggaataaatgtatacaatggcctcccaccaatgcttccttggaggaacatagtatagaaaagaatataactgtgaattataatggtacacttataaatgaaactgtctttgagtttgactggaagtcatatattcaagattcaagatatcattatttcctggagggttttttagatgcactactatgtggaaatagctctgatgcaggccaatgtccagagggatatgtgtgtgaaagctggtagaaatcccaattatggctacacaagctttgataccttcagttgggcttttttgtccttgtttcgactaatgactcaggacttctgggaaaatctttatcaactgacattacgtgctgctgggaaaacgtacatgatattttttgtattggtcattttcttgggctcattctacctaataaatttgatcctggctgtggtggccatggcctacgaggaacagaatcaggccaccttggaagaagcagaacagaaagaggccgaatttcagcagatgattgaacagcttaaaaagcaacaggaggcagctcagcaggcagcaacggcaactgcctcagaacattccagagagcccagtgcagcaggcaggctctcagacagctcatctgaagcctctaagttgagttccaagagtgctaaggaaagaagaaatcggaggaagaaaagaaaacagaaagagcagtctggtggggaagagaaagatgaggatgaattccaaaaatctgaatctgaggacagcatcaggaggaaaggttttcgcttctccattgaagggaaccgattgacatatgaaaagaggtactcctccccacaccagtctttgttgagcatccgtggctccctattttcaccaaggcgaaatagcagaacaagccttttcagctttagagggcgagcaaaggatgtgggatctgagaacgacttcgcagatgatgagcacagcacctttgaggataacgagagccgtagagattccttgtttgtgccccgacgacacggagagagacgcaacagcaacctgagtcagaccagtaggtcatcccggatgctggcagtgtttccagcgaatgggaagatgcacagcactgtggattgcaatggtgtggtttccttggttggtggaccttcagttcctacatcgcctgttggacagcttctgccagaggtgataatagataagccagctactgatgacaatggaacaaccactgaaactgaaatgagaaagagaaggtcaagttctttccacgtttccatggactttctagaagatccttcccaaaggcaacgagcaatgagtatagccagcattctaacaaatacagtagaagaacttgaagaatccaggcagaaatgcccaccctgttggtataaattttccaacatattcttaatctgggactgttctccatattggttaaaagtgaaacatgttgtcaacctggttgtgatggacccatttgttgacctggccatcaccatctgtattgtcttaaatactcttttcatggccatggagcactatccaatgacggaccatttcaataatgtgcttacagtaggaaacttggttttcactgggatctttacagcagaaatgtttctgaaaattattgccatggatccttactattatttccaagaaggctggaatatctttgacggttttattgtgacgcttagcctggtagaacttggactcgccaatgtggaaggattatctgttctccgttcatttcgattgctgcgagttttcaagttggcaaaatcttggccaacgttaaatatgctaataaagatcatcggcaattccgtgggggctctgggaaatttaaccctcgtcttggccatcatcgtcttcatttttgccgtggtcggcatgcagctctttggtaaaagctacaaagattgtgtctgcaagatcgccagtgattgtcaactcccacgctggcacatgaatgacttcttccactccttcctgattgtgttccgcgtgctgtgtggggagtggatagagaccatgtgggactgtatggaggttgctggtcaagccatgtgccttactgtcttcatgatggtcatggtgattggaaacctagtggtcctgaatctctttctggccttgcttctgagctcatttagtgcagacaaccttgcagccactgatgatgataatgaaatgaataatctccaaattgctgtggataggatgcacaaaggagtagcttatgtgaaaagaaaaatatatgaatttattcaacagtccttcattaggaaacaaaagattttagatgaaattaaaccacttgatgatctaaacaacaagaaagacagttgtatgtccaatcatacaacagaaattgggaaagatcttgactatcttaaagatgtaaatggaactacaagtggtataggaactggcagcagtgttgaaaaatacattattgatgaaagtgattacatgtcattcataaacaaccccagtcttactgtgactgtaccaattgctgtaggagaatctgactttgaaaatttaaacacggaagactttagtagtgaatcggatctggaagaaagcaaagagaaactgaatgaaagcagtagctcatcagaaggtagcactgtggacatcggcgcacctgtagaagaacagcccgtagtggaacctgaagaaactcttgaaccagaagcttgtttcactgaaggctgtgtacaaagattcaagtgttgtcaaatcaatgtggaagaaggcagaggaaaacaatggtggaacctgagaaggacgtgtttccgaatagttgaacataactggtttgagaccttcattgttttcatgattctccttagtagtggtgctctggcatttgaagatatatatattgatcagcgaaagacgattaagacgatgttggaatatgctgacaaggttttcacttacattttcattctggaaatgcttctaaaatgggtggcatatggctatcaaacatatttcaccaatgcctggtgttggctggacttcttaattgttgatgtttcattggtcagtttaacagcaaatgccttgggttactcagaacttggagccatcaaatctctcaggacactaagagctctgagacctctaagagccttatctcgatttgaagggatgagggtggttgtgaatgcccttttaggagcaattccatccatcatgaatgtgcttctggtttgtcttatattctggctaattttcagcatcatgggcgtaaatttgtttgctggcaaattctaccactgtattaacaccacaactggtgacaggtttgacatcgaagacgtgaataatcatactgattgcctaaaactaatagaaagaaatgagactgctcgatggaaaaatgtgaaagtaaactttgataatgtaggatttgggtatctctctttgcttcaagttgccacattcaaaggatggatggatataatgtatgcagcagttgattccagaaatgtggaactccagcctaagtatgaaaaaagtctgtacatgtatctttactttgttattttcatcatctttgggtccttcttcaccttgaacctgtttattggtgtcatcatagataatttcaaccagcagaaaaagaagtttggaggtcaagacatctttatgacagaagaacagaagaaatactataatgcaatgaaaaaattaggatcgaaaaaaccgcaaaagcctatacctcgaccaggaaacaaatttcaaggaatggtctttgacttcgtaaccagacaagtttttgacataagcatcatgattctcatctgtcttaacatggtcacaatgatggtggaaacagatgaccagagtgaatatgtgactaccattttgtcacgcatcaatctggtgttcattgtgctatttactggagagtgtgtactgaaactcatctctctacgccattattattttaccattggatggaatatttttgattttgtggttgtcattctctccattgtaggtatgtttcttgccgagctgatagaaaagtatttcgtgtcccctaccctgttccgagtgatccgtcttgctaggattggccgaatcctacgtctgatcaaaggagcaaaggggatccgcacgctgctctttgctttgatgatgtcccttcctgcgttgtttaacatcggcctcctactcttcctagtcatgttcatctacgccatctttgggatgtccaactttgcctatgttaagagggaagttgggatcgatgacatgttcaactttgagacctttggcaacagcatgatctgcctattccaaattacaacctctgctggctgggatggattgctagcacccattctcaacagtaagccacccgactgtgaccctaataaagttaaccctggaagctcagttaagggagactgtgggaacccatctgttggaattttcttttttgtcagttacatcatcatatccttcctggttgtggtgaacatgtacatcgcggtcatcctggagaacttcagtgttgctactgaagaaagtgcagagcctctgagtgaggatgactttgagatgttctatgaggtttgggagaagtttgatcccgatgcaactcagttcatggaatttgaaaaattatctcagtttgcagctgcgcttgaaccgcctctcaatctgccacaaccaaacaaactccagctcattgccatggatttgcccatggtgagtggtgaccggatccactgtcttgatatcttatttgcttttacaaagcgggttctaggagagagtggagagatggatgctctacgaatacagatggaagagcgattcatggcttccaatccttccaaggtctcctatcagccaatcactactactttaaaacgaaaacaagaggaagtatctgctgtcattattcagcgtgcttacagacgccaccttttaaagcgaactgtaaaacaagcttcctttacgtacaataaaaacaaaatcaaaggtggggctaatcttcttataaaagaagacatgataattgacagaataaatgaaaactctattacagaaaaaactgatctgaccatgtccactgcagcttgtccaccttcctatgaccgggtgacaaagccaattgtggaaaaacatgagcaagaaggcaaagatgaaaaagccaaagggaaataaatgaaaataaataaaaataattgggtgacaaattgtttacagcctgtgaaggtgatgtatttttatcaacaggactcctttaggaggtcaatgccaaactgactgtttttacacaaatctccttaaggtcagtgcctacaataagacagtgaccccttgtcagcaaactgtgactctgtgtaaaggggagatgaccttgacaggaggttactgttctcactaccagctgacactgctgaagataagatgcacaatggctagtcagactgtagggaccagtttcaaggggtgcaaacctgtgattttggggttgtttaacatgaaacactttagtgtagtaattgtatccactgtttgcatttcaactgccacatttgtcacatttttatggaatctgttagtggattcatctttttgttaatccatgtgtttattatatgtgactatttttgtaaacgaagtttctgttgagaaataggctaaggacctctataacaggtatgccacctggggggtatggcaaccacatggccctcccagctacacaaagtcgtggtttgcatgagggcatgctgcacttagagatcatgcatgagaaaaagtcacaagaaaaacaaattcttaaatttcaccatatttctgggaggggtaattgggtgataagtggaggtgctttgttgatcttgttttgcgaaatccagcccctagaccaagtagattatttgtgggtaggccagtaaatcttagcaggtgcaaacttcattcaaatgtttggagtcataaatgttatgtttctttttgttgtattaaaaaaaaaacctgaatagtgaatattgcccctcaccctccaccgccagaagactgaattgaccaaaattactctttataaatttctgctttttcctgcactttgtttagccatctttgggctctcagcaaggttgacactgtatatgttaatgaaatgctatttattatgtaaatagtcattttaccctgtggtgcacgtttgagcaaacaaataatgacctaagcacagtatttattgcatcaaatatgtaccacaagaaatgtagagtgcaagctttacacaggtaataaaatgtattctgtaccatttatagatagtttggatgctatcaatgcatgtttatattaccatgctgctgtatctggtttctctcactgctcagaatctcatttatgagaaaccatatgtcagtggtaaagtcaaggaaattgttcaacagatctcatttatttaagtcattaagcaatagtttgcagcactttaacagctttttggttatttttacattttaagtggataacatatggtatatagccagactgtacagacatgtttaaaaaaacacactgcttaacctattaaatatgtgtttagaattttataagcaaatataaatactgtaaaaagtcactttattttatttttcagcattatgtacataaatatgaagaggaaattatcttcaggttgatatcacaatcacttttcttactttctgtccatagtactttttcatgaaagaaatttgctaaataagacatgaaaacaagactgggtagttgtagatttctgctttttaaattacatttgctaattttagattatttcacaattttaaggagcaaaataggttcacgattcatatccaaattatgctttgcaattggaaaagggtttaaaattttatttatatttctggtagtacctgtactaactgaattgaaggtagtgcttatgttatttttgttctttttttctgacttcggtttatgttttcatttctttggagtaatgctgctctagattgttctaaatagaatgtgggcttcataatttttttttccacaaaaacagagtagtcaacttatatagtcaattacatcaggacattttgtgtttcttacagaagcaaaccataggctcctcttttccttaaaactacttagataaactgtattcgtgaactgcatgctggaaaatgctactattatgctaaataatgctaaccaacatttaaaatgtgcaaaactaataaagattacattttttatttt

SEQ ID NO: 28 - DNA, 8379 bp, Homo sapiens
atactgcagaggtctctggtgcatgtgtgtatgtgtgcgtttgtgtgtgtttgtgtgtctgtgtgttctgccccagtgagactgcagcccttgtaaatactttgacaccttttgcaagaaggaatctgaacaattgcaactgaaggcacattgttatcatctcgtctttgggtgatgctgttcctcactgcagatggataattttccttttaatcaggaatttcatatgcagaataaatggtaattaaaatgtgcaggatgacaagatggagcaaacagtgcttgtaccaccaggacctgacagcttcaacttcttcaccagagaatctcttgcggctattgaaagacgcattgcagaagaaaaggcaaagaatcccaaaccagacaaaaaagatgacgacgaaaatggcccaaagccaaatagtgacttggaagctggaaagaaccttccatttatttatggagacattcctccagagatggtgtcagagcccctggaggacctggacccctactatatcaataagaaaacttttatagtattgaataaattgaaggccatcttccggttcagtgccacctctgccctgtacattttaactcccttcaatcctcttaggaaaatagctattaagattttggtacattcattattcagcatgctaattatgtgcactattttgacaaactgtgtgtttatgacaatgagtaaccctcctgattggacaaagaatgtagaatacaccttcacaggaatatatacttttgaatcacttataaaaattattgcaaggggattctgtttagaagattttactttccttcgggatccatggaactggctcgatttcactgtcattacatttgcgtacgtcacagagtttgtggacctgggcaatgtctcggcattgagaacattcagagttctccgagcattgaagacgatttcagtcattccaggcctgaaaaccattgtgggagccctgatccagtctgtgaagaagctctcagatgtaatgatcctgactgtgttctgtctgagcgtatttgctctaattgggctgcagctgttcatgggcaacctgaggaataaatgtatacaatggcctcccaccaatgcttccttggaggaacatagtatagaaaagaatataactgtgaattataatggtacacttataaatgaaactgtctttgagtttgactggaagtcatatattcaagattcaagatatcattatttcctggagggttttttagatgcactactatgtggaaatagctctgatgcaggccaatgtccagagggatatatgtgtgaaagctggtagaaatcccaattatggctacacaagctttgataccttcagttgggcttttttgtccttgtttcgactaatgactcaggacttctgggaaaatctttatcaactgacattacgtgctgctgggaaaacgtacatgatattttttgtattggtcattttcttgggctcattctacctaataaatttgatcctggctgtggtggccatggcctacgaggaacagaatcaggccaccttggaagaagcagaacagaaagaggccgaatttcagcagatgattgaacagcttaaaaagcaacaggaggcagctcagcaggcagcaacggcaactgcctcagaacattccagagagcccagtgcagcaggcaggctctcagacagctcatctgaagcctctaagttgagttccaagagtgctaaggaaagaagaaatcggaggaagaaaagaaaacagaaagagcagtctggtggggaagagaaagatgaggatgaattccaaaaatctgaatctgaggacagcatcaggaggaaaggttttcgcttctccattgaagggaaccgattgacatatgaaaagaggtactcctccccacaccagtctttgttgagcatccgtggctccctattttcaccaaggcgaaatagcagaacaagccttttcagctttagagggcgagcaaaggatgtgggatctgagaacgacttcgcagatgatgagcacagcacctttgaggataacgagagccgtagagattccttgtttgtgccccgacgacacggagagagacgcaacagcaacctgagtcagaccagtaggtcatcccggatgctggcagtgtttccagcgaatgggaagatgcacagcactgtggattgcaatggtgtggtttccttggttggtggaccttcagttcctacatcgcctgttggacagcttctgccagaggtgataatagataagccagctactgatgacaatggaacaaccactgaaactgaaatgagaaagagaaggtcaagttctttccacgtttccatggactttctagaagatccttcccaaaggcaacgagcaatgagtatagccagcattctaacaaatacagtagaagaacttgaagaatccaggcagaaatgcccaccctgttggtataaattttccaacatattcttaatctgggactgttctccatattggttaaaagtgaaacatgttgtcaacctggttgtgatggacccatttgttgacctggccatcaccatctgtattgtcttaaatactcttttcatggccatggagcactatccaatgacggaccatttcaataatgtgcttacagtaggaaacttggttttcactgggatctttacagcagaaatgtttctgaaaattattgccatggatccttactattatttccaagaaggctggaatatctttgacggttttattgtgacgcttagcctggtagaacttggactcgccaatgtggaaggattatctgttctccgttcatttcgattgctgcgagttttcaagttggcaaaatcttggccaacgttaaatatgctaataaagatcatcggcaattccgtgggggctctgggaaatttaaccctcgtcttggccatcatcgtcttcatttttgccgtggtcggcatgcagctctttggtaaaagctacaaagattgtgtctgcaagatcgccagtgattgtcaactcccacgctggcacatgaatgacttcttccactccttcctgattgtgttccgcgtgctgtgtggggagtggatagagaccatgtgggactgtatggaggttgctggtcaagccatgtgccttactgtcttcatgatggtcatggtgattggaaacctagtggtcctgaatctctttctggccttgcttctgagctcatttagtgcagacaaccttgcagccactgatgatgataatgaaatgaataatctccaaattgctgtggataggatgcacaaaggagtagcttatgtgaaaagaaaaatatatgaatttattcaacagtccttcattaggaaacaaaagattttagatgaaattaaaccacttgatgatctaaacaacaagaaagacagttgtatgtccaatcatacaacagaaattgggaaagatcttgactatcttaaagatgtaaatggaactacaagtggtataggaactggcagcagtgttgaaaaatacattattgatgaaagtgattacatgtcattcataaacaaccccagtcttactgtgactgtaccaattgctgtaggagaatctgactttgaaaatttaaacacggaagactttagtagtgaatcggatctggaagaaagcaaagagaaactgaatgaaagcagtagctcatcagaaggtagcactgtggacatcggcgcacctgtagaagaacagcccgtagtggaacctgaagaaactcttgaaccagaagcttgtttcactgaaggctgtgtacaaagattcaagtgttgtcaaatcaatgtggaagaaggcagaggaaaacaatggtggaacctgagaaggacgtgtttccgaatagttgaacataactggtttgagaccttcattgttttcatgattctccttagtagtggtgctctggcatttgaagatatatatattgatcagcgaaagacgattaagacgatgttggaatatgctgacaaggttttcacttacattttcattctggaaatgcttctaaaatgggtggcatatggctatcaaacatatttcaccaatgcctggtgttggctggacttcttaattgttgatgtttcattggtcagtttaacagcaaatgccttgggttactcagaacttggagccatcaaatctctcaggacactaagagctctgagacctctaagagccttatctcgatttgaagggatgagggtggttgtgaatgcccttttaggagcaattccatccatcatgaatgtgcttctggtttgtcttatattctggctaattttcagcatcatgggcgtaaatttgtttgctggcaaattctaccactgtattaacaccacaactggtgacaggtttgacatcgaagacgtgaataatcatactgattgcctaaaactaatagaaagaaatgagactgctcgatggaaaaatgtgaaagtaaactttgataatgtaggatttgggtatctctctttgcttcaagttgccacattcaaaggatggatggatataatgtatgcagcagttgattccagaaatgtggaactccagcctaagtatgaaaaaagtctgtacatgtatctttactttgttattttcatcatctttgggtccttcttcaccttgaacctgtttattggtgtcatcatagataatttcaaccagcagaaaaagaagtttggaggtcaagacatctttatgacagaagaacagaagaaatactataatgcaatgaaaaaattaggatcgaaaaaaccgcaaaagcctatacctcgaccaggaaacaaatttcaaggaatggtctttgacttcgtaaccagacaagtttttgacataagcatcatgattctcatctgtcttaacatggtcacaatgatggtggaaacagatgaccagagtgaatatgtgactaccattttgtcacgcatcaatctggtgttcattgtgctatttactggagagtgtgtactgaaactcatctctctacgccattattattttaccattggatggaatatttttgattttgtggttgtcattctctccattgtaggtatgtttcttgccgagctgatagaaaagtatttcgtgtcccctaccctgttccgagtgatccgtcttgctaggattggccgaatcctacgtctgatcaaaggagcaaaggggatccgcacgctgctctttgctttgatgatgtcccttcctgcgttgtttaacatcggcctcctactcttcctagtcatgttcatctacgccatctttgggatgtccaactttgcctatgttaagagggaagttgggatcgatgacatgttcaactttgagacctttggcaacagcatgatctgcctattccaaattacaacctctgctggctgggatggattgctagcacccattctcaacagtaagccacccgactgtgaccctaataaagttaaccctggaagctcagttaagggagactgtgggaacccatctgttggaattttcttttttgtcagttacatcatcatatccttcctggttgtggtgaacatgtacatcgcggtcatcctggagaacttcagtgttgctactgaagaaagtgcagagcctctgagtgaggatgactttgagatgttctatgaggtttgggagaagtttgatcccgatgcaactcagttcatggaatttgaaaaattatctcagtttgcagctgcgcttgaaccgcctctcaatctgccacaaccaaacaaactccagctcattgccatggatttgcccatggtgagtggtgaccggatccactgtcttgatatcttatttgcttttacaaagcgggttctaggagagagtggagagatggatgctctacgaatacagatggaagagcgattcatggcttccaatccttccaaggtctcctatcagccaatcactactactttaaaacgaaaacaagaggaagtatctgctgtcattattcagcgtgcttacagacgccaccttttaaagcgaactgtaaaacaagcttcctttacgtacaataaaaacaaaatcaaaggtggggctaatcttcttataaaagaagacatgataattgacagaataaatgaaaactctattacagaaaaaactgatctgaccatgtccactgcagcttgtccaccttcctatgaccgggtgacaaagccaattgtggaaaaacatgagcaagaaggcaaagatgaaaaagccaaagggaaataaatgaaaataaataaaaataattgggtgacaaattgtttacagcctgtgaaggtgatgtatttttatcaacaggactcctttaggaggtcaatgccaaactgactgtttttacacaaatctccttaaggtcagtgcctacaataagacagtgaccccttgtcagcaaactgtgactctgtgtaaaggggagatgaccttgacaggaggttactgttctcactaccagctgacactgctgaagataagatgcacaatggctagtcagactgtagggaccagtttcaaggggtgcaaacctgtgattttggggttgtttaacatgaaacactttagtgtagtaattgtatccactgtttgcatttcaactgccacatttgtcacatttttatggaatctgttagtggattcatctttttgttaatccatgtgtttattatatgtgactatttttgtaaacgaagtttctgttgagaaataggctaaggacctctataacaggtatgccacctggggggtatggcaaccacatggccctcccagctacacaaagtcgtggtttgcatgagggcatgctgcacttagagatcatgcatgagaaaaagtcacaagaaaaacaaattcttaaatttcaccatatttctgggaggggtaattgggtgataagtggaggtgctttgttgatcttgttttgcgaaatccagcccctagaccaagtagattatttgtgggtaggccagtaaatcttagcaggtgcaaacttcattcaaatgtttggagtcataaatgttatgtttctttttgttgtattaaaaaaaaaacctgaatagtgaatattgcccctcaccctccaccgccagaagactgaattgaccaaaattactctttataaatttctgctttttcctgcactttgtttagccatctttgggctctcagcaaggttgacactgtatatgttaatgaaatgctatttattatgtaaatagtcattttaccctgtggtgcacgtttgagcaaacaaataatgacctaagcacagtatttattgcatcaaatatgtaccacaagaaatgtagagtgcaagctttacacaggtaataaaatgtattctgtaccatttatagatagtttggatgctatcaatgcatgtttatattaccatgctgctgtatctggtttctctcactgctcagaatctcatttatgagaaaccatatgtcagtggtaaagtcaaggaaattgttcaacagatctcatttatttaagtcattaagcaatagtttgcagcactttaacagctttttggttatttttacattttaagtggataacatatggtatatagccagactgtacagacatgtttaaaaaaacacactgcttaacctattaaatatgtgtttagaattttataagcaaatataaatactgtaaaaagtcactttattttatttttcagcattatgtacataaatatgaagaggaaattatcttcaggttgatatcacaatcacttttcttactttctgtccatagtactttttcatgaaagaaatttgctaaataagacatgaaaacaagactgggtagttgtagatttctgctttttaaattacatttgctaattttagattatttcacaattttaaggagcaaaataggttcacgattcatatccaaattatgctttgcaattggaaaagggtttaaaattttatttatatttctggtagtacctgtactaactgaattgaaggtagtgcttatgttatttttgttctttttttctgacttcggtttatgttttcatttctttggagtaatgctgctctagattgttctaaatagaatgtgggcttcataatttttttttccacaaaaacagagtagtcaacttatatagtcaattacatcaggacattttgtgtttcttacagaagcaaaccataggctcctcttttccttaaaactacttagataaactgtattcgtgaactgcatgctggaaaatgctactattatgctaaataatgctaaccaacatttaaaatgtgcaaaactaataaagattacattttttatttt

SEQ ID NO: 29 - DNA, 8379 bp, Homo sapiens
atactgcagaggtctctggtgcatgtgtgtatgtgtgcgtttgtgtgtgtttgtgtgtctgtgtgttctgccccagtgagactgcagcccttgtaaatactttgacaccttttgcaagaaggaatctgaacaattgcaactgaaggcacattgttatcatctcgtctttgggtgatgctgttcctcactgcagatggataattttccttttaatcaggaatttcatatgcagaataaatggtaattaaaatgtgcaggatgacaagatggagcaaacagtgcttgtaccaccaggacctgacagcttcaacttcttcaccagagaatctcttgcggctattgaaagacgcattgcagaagaaaaggcaaagaatcccaaaccagacaaaaaagatgacgacgaaaatggcccaaagccaaatagtgacttggaagctggaaagaaccttccatttatttatggagacattcctccagagatggtgtcagagcccctggaggacctggacccctactatatcaataagaaaacttttatagtattgaataaattgaaggccatcttccggttcagtgccacctctgccctgtacattttaactcccttcaatcctcttaggaaaatagctattaagattttggtacattcattattcagcatgctaattatgtgcactattttgacaaactgtgtgtttatgacaatgagtaaccctcctgattggacaaagaatgtagaatacaccttcacaggaatatatacttttgaatcacttataaaaattattgcaaggggattctgtttagaagattttactttccttcgggatccatggaactggctcgatttcactgtcattacatttgcgtacgtcacagagtttgtggacctgggcaatgtctcggcattgagaacattcagagttctccgagcattgaagacgatttcagtcattccaggcctgaaaaccattgtgggagccctgatccagtctgtgaagaagctctcagatgtaatgatcctgactgtgttctgtctgagcgtatttgctctaattgggctgcagctgttcatgggcaacctgaggaataaatgtatacaatggcctcccaccaatgcttccttggaggaacatagtatagaaaagaatataactgtgaattataatggtacacttataaatgaaactgtctttgagtttgactggaagtcatatattcaagattcaagatatcattatttcctggagggttttttagatgcactactatgtggaaatagctctgatgcaggccaatgtccagagggatatatgtgtgtgaaagctggtagaaatcccaattatggctacacaagctttgataccttcagttgggcttttttgtccttgtttcgactaatgactcaggacttctgggaaaatctttatcaactgacattacgtgctgctgggaaaacgtacatgatattttttgtattggtcattttcttgggctcattctacctaataaatttgatcctggctgtggtggccatggcctacgaggaacagaatcaggccaccttggaagaagcagaacagaaagaggccgaatttcagcagatgattgaacagcttaaaaagcaacaggaggcagctcagcaggcagcaacggcaactgcctcagaacattccagagagcccagtgcagcaggcaggctctcagacagctcatctgaagcctctaagttgagttccaagagtgctaaggaaagaagaaatcggaggaagaaaagaaaacagaaagagcagtctggtggggaagagaaagatgaggatgaattccaaaaatctgaatctgaggacagcatcaggaggaaaggttttcgcttctccattgaagggaaccgattgacatatgaagaggtactcctccccacaccagtctttgttgagcatccgtggctccctattttcaccaaggcgaaatagcagaacaagccttttcagctttagagggcgagcaaaggatgtgggatctgagaacgacttcgcagatgatgagcacagcacctttgaggataacgagagccgtagagattccttgtttgtgccccgacgacacggagagagacgcaacagcaacctgagtcagaccagtaggtcatcccggatgctggcagtgtttccagcgaatgggaagatgcacagcactgtggattgcaatggtgtggtttccttggttggtggaccttcagttcctacatcgcctgttggacagcttctgccagaggtgataatagataagccagctactgatgacaatggaacaaccactgaaactgaaatgagaaagagaaggtcaagttctttccacgtttccatggactttctagaagatccttcccaaaggcaacgagcaatgagtatagccagcattctaacaaatacagtagaagaacttgaagaatccaggcagaaatgcccaccctgttggtataaattttccaacatattcttaatctgggactgttctccatattggttaaaagtgaaacatgttgtcaacctggttgtgatggacccatttgttgacctggccatcaccatctgtattgtcttaaatactcttttcatggccatggagcactatccaatgacggaccatttcaataatgtgcttacagtaggaaacttggttttcactgggatctttacagcagaaatgtttctgaaaattattgccatggatccttactattatttccaagaaggctggaatatctttgacggttttattgtgacgcttagcctggtagaacttggactcgccaatgtggaaggattatctgttctccgttcatttcgattgctgcgagttttcaagttggcaaaatcttggccaacgttaaatatgctaataaagatcatcggcaattccgtgggggctctgggaaatttaaccctcgtcttggccatcatcgtcttcatttttgccgtggtcggcatgcagctctttggtaaaagctacaaagattgtgtctgcaagatcgccagtgattgtcaactcccacgctggcacatgaatgacttcttccactccttcctgattgtgttccgcgtgctgtgtggggagtggatagagaccatgtgggactgtatggaggttgctggtcaagccatgtgccttactgtcttcatgatggtcatggtgattggaaacctagtggtcctgaatctctttctggccttgcttctgagctcatttagtgcagacaaccttgcagccactgatgatgataatgaaatgaataatctccaaattgctgtggataggatgcacaaaggagtagcttatgtgaaaagaaaaatatatgaatttattcaacagtccttcattaggaaacaaaagattttagatgaaattaaaccacttgatgatctaaacaacaagaaagacagttgtatgtccaatcatacaacagaaattgggaaagatcttgactatcttaaagatgtaaatggaactacaagtggtataggaactggcagcagtgttgaaaaatacattattgatgaaagtgattacatgtcattcataaacaaccccagtcttactgtgactgtaccaattgctgtaggagaatctgactttgaaaatttaaacacggaagactttagtagtgaatcggatctggaagaaagcaaagagaaactgaatgaaagcagtagctcatcagaaggtagcactgtggacatcggcgcacctgtagaagaacagcccgtagtggaacctgaagaaactcttgaaccagaagcttgtttcactgaaggctgtgtacaaagattcaagtgttgtcaaatcaatgtggaagaaggcagaggaaaacaatggtggaacctgagaaggacgtgtttccgaatagttgaacataactggtttgagaccttcattgttttcatgattctccttagtagtggtgctctggcatttgaagatatatatattgatcagcgaaagacgattaagacgatgttggaatatgctgacaaggttttcacttacattttcattctggaaatgcttctaaaatgggtggcatatggctatcaaacatatttcaccaatgcctggtgttggctggacttcttaattgttgatgtttcattggtcagtttaacagcaaatgccttgggttactcagaacttggagccatcaaatctctcaggacactaagagctctgagacctctaagagccttatctcgatttgaagggatgagggtggttgtgaatgcccttttaggagcaattccatccatcatgaatgtgcttctggtttgtcttatattctggctaattttcagcatcatgggcgtaaatttgtttgctggcaaattctaccactgtattaacaccacaactggtgacaggtttgacatcgaagacgtgaataatcatactgattgcctaaaactaatagaaagaaatgagactgctcgatggaaaaatgtgaaagtaaactttgataatgtaggatttgggtatctctctttgcttcaagttgccacattcaaaggatggatggatataatgtatgcagcagttgattccagaaatgtggaactccagcctaagtatgaaaaaagtctgtacatgtatctttactttgttattttcatcatctttgggtccttcttcaccttgaacctgtttattggtgtcatcatagataatttcaaccagcagaaaaagaagtttggaggtcaagacatctttatgacagaagaacagaagaaatactataatgcaatgaaaaaattaggatcgaaaaaaccgcaaaagcctatacctcgaccaggaaacaaatttcaaggaatggtctttgacttcgtaaccagacaagtttttgacataagcatcatgattctcatctgtcttaacatggtcacaatgatggtggaaacagatgaccagagtgaatatgtgactaccattttgtcacgcatcaatctggtgttcattgtgctatttactggagagtgtgtactgaaactcatctctctacgccattattattttaccattggatggaatatttttgattttgtggttgtcattctctccattgtaggtatgtttcttgccgagctgatagaaaagtatttcgtgtcccctaccctgttccgagtgatccgtcttgctaggattggccgaatcctacgtctgatcaaaggagcaaaggggatccgcacgctgctctttgctttgatgatgtcccttcctgcgttgtttaacatcggcctcctactcttcctagtcatgttcatctacgccatctttgggatgtccaactttgcctatgttaagagggaagttgggatcgatgacatgttcaactttgagacctttggcaacagcatgatctgcctattccaaattacaacctctgctggctgggatggattgctagcacccattctcaacagtaagccacccgactgtgaccctaataaagttaaccctggaagctcagttaagggagactgtgggaacccatctgttggaattttcttttttgtcagttacatcatcatatccttcctggttgtggtgaacatgtacatcgcggtcatcctggagaacttcagtgttgctactgaagaaagtgcagagcctctgagtgaggatgactttgagatgttctatgaggtttgggagaagtttgatcccgatgcaactcagttcatggaatttgaaaaattatctcagtttgcagctgcgcttgaaccgcctctcaatctgccacaaccaaacaaactccagctcattgccatggatttgcccatggtgagtggtgaccggatccactgtcttgatatcttatttgcttttacaaagcgggttctaggagagagtggagagatggatgctctacgaatacagatggaagagcgattcatggcttccaatccttccaaggtctcctatcagccaatcactactactttaaaacgaaaacaagaggaagtatctgctgtcattattcagcgtgcttacagacgccaccttttaaagcgaactgtaaaacaagcttcctttacgtacaataaaaacaaaatcaaaggtggggctaatcttcttataaaagaagacatgataattgacagaataaatgaaaactctattacagaaaaaactgatctgaccatgtccactgcagcttgtccaccttcctatgaccgggtgacaaagccaattgtggaaaaacatgagcaagaaggcaaagatgaaaaagccaaagggaaataaatgaaaataaataaaaataattgggtgacaaattgtttacagcctgtgaaggtgatgtatttttatcaacaggactcctttaggaggtcaatgccaaactgactgtttttacacaaatctccttaaggtcagtgcctacaataagacagtgaccccttgtcagcaaactgtgactctgtgtaaaggggagatgaccttgacaggaggttactgttctcactaccagctgacactgctgaagataagatgcacaatggctagtcagactgtagggaccagtttcaaggggtgcaaacctgtgattttggggttgtttaacatgaaacactttagtgtagtaattgtatccactgtttgcatttcaactgccacatttgtcacatttttatggaatctgttagtggattcatctttttgttaatccatgtgtttattatatgtgactatttttgtaaacgaagtttctgttgagaaataggctaaggacctctataacaggtatgccacctggggggtatggcaaccacatggccctcccagctacacaaagtcgtggtttgcatgagggcatgctgcacttagagatcatgcatgagaaaaagtcacaagaaaaacaaattcttaaatttcaccatatttctgggaggggtaattgggtgataagtggaggtgctttgttgatcttgttttgcgaaatccagcccctagaccaagtagattatttgtgggtaggccagtaaatcttagcaggtgcaaacttcattcaaatgtttggagtcataaatgttatgtttctttttgttgtattaaaaaaaaaacctgaatagtgaatattgcccctcaccctccaccgccagaagactgaattgaccaaaattactctttataaatttctgctttttcctgcactttgtttagccatctttgggctctcagcaaggttgacactgtatatgttaatgaaatgctatttattatgtaaatagtcattttaccctgtggtgcacgtttgagcaaacaaataatgacctaagcacagtatttattgcatcaaatatgtaccacaagaaatgtagagtgcaagctttacacaggtaataaaatgtattctgtaccatttatagatagtttggatgctatcaatgcatgtttatattaccatgctgctgtatctggtttctctcactgctcagaatctcatttatgagaaaccatatgtcagtggtaaagtcaaggaaattgttcaacagatctcatttatttaagtcattaagcaatagtttgcagcactttaacagctttttggttatttttacattttaagtggataacatatggtatatagccagactgtacagacatgtttaaaaaaacacactgcttaacctattaaatatgtgtttagaattttataagcaaatataaatactgtaaaaagtcactttattttatttttcagcattatgtacataaatatgaagaggaaattatcttcaggttgatatcacaatcacttttcttactttctgtccatagtactttttcatgaaagaaatttgctaaataagacatgaaaacaagactgggtagttgtagatttctgctttttaaattacatttgctaattttagattatttcacaattttaaggagcaaaataggttcacgattcatatccaaattatgctttgcaattggaaaagggtttaaaattttatttatatttctggtagtacctgtactaactgaattgaaggtagtgcttatgttatttttgttctttttttctgacttcggtttatgttttcatttctttggagtaatgctgctctagattgttctaaatagaatgtgggcttcataatttttttttccacaaaaacagagtagtcaacttatatagtcaattacatcaggacattttgtgtttcttacagaagcaaaccataggctcctcttttccttaaaactacttagataaactgtattcgtgaactgcatgctggaaaatgctactattatgctaaataatgctaaccaacatttaaaatgtgcaaaactaataaagattacattttttatttt

SEQ ID NO: 30 - DNA, 8380 bp, Homo sapiens
atactgcagaggtctctggtgcatgtgtgtatgtgtgcgtttgtgtgtgtttgtgtgtctgtgtgttctgccccagtgagactgcagcccttgtaaatactttgacaccttttgcaagaaggaatctgaacaattgcaactgaaggcacattgttatcatctcgtctttgggtgatgctgttcctcactgcagatggataattttccttttaatcaggaatttcatatgcagaataaatggtaattaaaatgtgcaggatgacaagatggagcaaacagtgcttgtaccaccaggacctgacagcttcaacttcttcaccagagaatctcttgcggctattgaaagacgcattgcagaagaaaaggcaaagaatcccaaaccagacaaaaaagatgacgacgaaaatggcccaaagccaaatagtgacttggaagctggaaagaaccttccatttatttatggagacattcctccagagatggtgtcagagcccctggaggacctggacccctactatatcaataagaaaacttttatagtattgaataaattgaaggccatcttccggttcagtgccacctctgccctgtacattttaactcccttcaatcctcttaggaaaatagctattaagattttggtacattcattattcagcatgctaattatgtgcactattttgacaaactgtgtgtttatgacaatgagtaaccctcctgattggacaaagaatgtagaatacaccttcacaggaatatatacttttgaatcacttataaaaattattgcaaggggattctgtttagaagattttactttccttcgggatccatggaactggctcgatttcactgtcattacatttgcgtacgtcacagagtttgtggacctgggcaatgtctcggcattgagaacattcagagttctccgagcattgaagacgatttcagtcattccaggcctgaaaaccattgtgggagccctgatccagtctgtgaagaagctctcagatgtaatgatcctgactgtgttctgtctgagcgtatttgctctaattgggctgcagctgttcatgggcaacctgaggaataaatgtatacaatggcctcccaccaatgcttccttggaggaacatagtatagaaaagaatataactgtgaattataatggtacacttataaatgaaactgtctttgagtttgactggaagtcatatattcaagattcaagatatcattatttcctggagggttttttagatgcactactatgtggaaatagctctgatgcaggccaatgtccagagggatatatgtgtgtgaaagctggtagaaatcccaattatggctacacaagctttgataccttcagttgggcttttttgtccttgtttcgactaatgactcaggacttctgggaaaatctttatcaactgacattacgtgctgctgggaaaacgtacatgatattttttgtattggtcattttcttgggctcattctacctaataaatttgatcctggctgtggtggccatggcctacgaggaacagaatcaggccaccttggaagaagcagaacagaaagaggccgaatttcagcagatgattgaacagcttaaaaagcaacaggaggcagctcagcaggcagcaacggcaactgcctcagaacattccagagagcccagtgcagcaggcaggctctcagacagctcatctgaagcctctaagttgagttccaagagtgctaaggaaagaagaaatcggaggaagaaaagaaaacagaaagagcagtctggtggggaagagaaagatgaggatgaattccaaaaatctgaatctgaggacagcatcaggaggaaaggttttcgcttctccattgaagggaaccgattgacatatgaaaagaggtactcctccccacaccagtctttgttgagcatccgtggctccctattttcaccaaggcgaaatagcagaacaagccttttcagctttagagggcgagcaaaggatgtgggatctgagaacgacttcgcagatgatgagcacagcacctttgaggataacgagagccgtagagattccttgtttgtgccccgacgacacggagagagacgcaacagcaacctgagtcagaccagtaggtcatcccggatgctggcagtgtttccagcgaatgggaagatgcacagcactgtggattgcaatggtgtggtttccttggttggtggaccttcagttcctacatcgcctgttggacagcttctgccagaggtgataatagataagccagctactgatgacaatggaacaaccactgaaactgaaatgagaaagagaaggtcaagttctttccacgtttccatggactttctagaagatccttcccaaaggcaacgagcaatgagtatagccagcattctaacaaatacagtagaagaacttgaagaatccaggcagaaatgcccaccctgttggtataaattttccaacatattcttaatctgggactgttctccatattggttaaaagtgaaacatgttgtcaacctggttgtgatggacccatttgttgacctggccatcaccatctgtattgtcttaaatactcttttcatggccatggagcactatccaatgacggaccatttcaataatgtgcttacagtaggaaacttggttttcactgggatctttacagcagaaatgtttctgaaaattattgccatggatccttactattatttccaagaaggctggaatatctttgacggttttattgtgacgcttagcctggtagaacttggactcgccaatgtggaaggttatctgttctccgttcatttcgattgctgcgagttttcaagttggcaaaatcttggccaacgttaaatatgctaataaagatcatcggcaattccgtgggggctctgggaaatttaaccctcgtcttggccatcatcgtcttcatttttgccgtggtcggcatgcagctctttggtaaaagctacaaagattgtgtctgcaagatcgccagtgattgtcaactcccacgctggcacatgaatgacttcttccactccttcctgattgtgttccgcgtgctgtgtggggagtggatagagaccatgtgggactgtatggaggttgctggtcaagccatgtgccttactgtcttcatgatggtcatggtgattggaaacctagtggtcctgaatctctttctggccttgcttctgagctcatttagtgcagacaaccttgcagccactgatgatgataatgaaatgaataatctccaaattgctgtggataggatgcacaaaggagtagcttatgtgaaaagaaaaatatatgaatttattcaacagtccttcattaggaaacaaaagattttagatgaaattaaaccacttgatgatctaaacaacaagaaagacagttgtatgtccaatcatacaacagaaattgggaaagatcttgactatcttaaagatgtaaatggaactacaagtggtataggaactggcagcagtgttgaaaaatacattattgatgaaagtgattacatgtcattcataaacaaccccagtcttactgtgactgtaccaattgctgtaggagaatctgactttgaaaatttaaacacggaagactttagtagtgaatcggatctggaagaaagcaaagagaaactgaatgaaagcagtagctcatcagaaggtagcactgtggacatcggcgcacctgtagaagaacagcccgtagtggaacctgaagaaactcttgaaccagaagcttgtttcactgaaggctgtgtacaaagattcaagtgttgtcaaatcaatgtggaagaaggcagaggaaaacaatggtggaacctgagaaggacgtgtttccgaatagttgaacataactggtttgagaccttcattgttttcatgattctccttagtagtggtgctctggcatttgaagatatatatattgatcagcgaaagacgattaagacgatgttggaatatgctgacaaggttttcacttacattttcattctggaaatgcttctaaaatgggtggcatatggctatcaaacatatttcaccaatgcctggtgttggctggacttcttaattgttgatgtttcattggtcagtttaacagcaaatgccttgggttactcagaacttggagccatcaaatctctcaggacactaagagctctgagacctctaagagccttatctcgatttgaagggatgagggtggttgtgaatgcccttttaggagcaattccatccatcatgaatgtgcttctggtttgtcttatattctggctaattttcagcatcatgggcgtaaatttgtttgctggcaaattctaccactgtattaacaccacaactggtgacaggtttgacatcgaagacgtgaataatcatactgattgcctaaaactaatagaaagaaatgagactgctcgatggaaaaatgtgaaagtaaactttgataatgtaggatttgggtatctctctttgcttcaagttgccacattcaaaggatggatggatataatgtatgcagcagttgattccagaaatgtggaactccagcctaagtatgaaaaaagtctgtacatgtatctttactttgttattttcatcatctttgggtccttcttcaccttgaacctgtttattggtgtcatcatagataatttcaaccagcagaaaaagaagtttggaggtcaagacatctttatgacagaagaacagaagaaatactataatgcaatgaaaaaattaggatcgaaaaaaccgcaaaagcctatacctcgaccaggaaacaaatttcaaggaatggtctttgacttcgtaaccagacaagtttttgacataagcatcatgattctcatctgtcttaacatggtcacaatgatggtggaaacagatgaccagagtgaatatgtgactaccattttgtcacgcatcaatctggtgttcattgtgctatttactggagagtgtgtactgaaactcatctctctacgccattattattttaccattggatggaatatttttgattttgtggttgtcattctctccattgtaggtatgtttcttgccgagctgatagaaaagtatttcgtgtcccctaccctgttccgagtgatccgtcttgctaggattggccgaatcctacgtctgatcaaaggagcaaaggggatccgcacgctgctctttgctttgatgatgtcccttcctgcgttgtttaacatcggcctcctactcttcctagtcatgttcatctacgccatctttgggatgtccaactttgcctatgttaagagggaagttgggatcgatgacatgttcaactttgagacctttggcaacagcatgatctgcctattccaaattacaacctctgctggctgggatggattgctagcacccattctcaacagtaagccacccgactgtgaccctaataaagttaaccctggaagctcagttaagggagactgtgggaacccatctgttggaattttcttttttgtcagttacatcatcatatccttcctggttgtggtgaacatgtacatcgcggtcatcctggagaacttcagtgttgctactgaagaaagtgcagagcctctgagtgaggatgactttgagatgttctatgaggtttgggagaagtttgatcccgatgcaactcagttcatggaatttgaaaaattatctcagtttgcagctgcgcttgaaccgcctctcaatctgccacaaccaaacaaactccagctcattgccatggatttgcccatggtgagtggtgaccggatccactgtcttgatatcttatttgcttttacaaagcgggttctaggagagagtggagagatggatgctctacgaatacagatggaagagcgattcatggcttccaatccttccaaggtctcctatcagccaatcactactactttaaaacgaaaacaagaggaagtatctgctgtcattattcagcgtgcttacagacgccaccttttaaagcgaactgtaaaacaagcttcctttacgtacaataaaaacaaaatcaaaggtggggctaatcttcttataaaagaagacatgataattgacagaataaatgaaaactctattacagaaaaaactgatctgaccatgtccactgcagcttgtccaccttcctatgaccgggtgacaaagccaattgtggaaaaacatgagcaagaaggcaaagatgaaaaagccaaagggaaataaatgaaaataaataaaaataattgggtgacaaattgtttacagcctgtgaaggtgatgtatttttatcaacaggactcctttaggaggtcaatgccaaactgactgtttttacacaaatctccttaaggtcagtgcctacaataagacagtgaccccttgtcagcaaactgtgactctgtgtaaaggggagatgaccttgacaggaggttactgttctcactaccagctgacactgctgaagataagatgcacaatggctagtcagactgtagggaccagtttcaaggggtgcaaacctgtgattttggggttgtttaacatgaaacactttagtgtagtaattgtatccactgtttgcatttcaactgccacatttgtcacatttttatggaatctgttagtggattcatctttttgttaatccatgtgtttattatatgtgactatttttgtaaacgaagtttctgttgagaaataggctaaggacctctataacaggtatgccacctggggggtatggcaaccacatggccctcccagctacacaaagtcgtggtttgcatgagggcatgctgcacttagagatcatgcatgagaaaaagtcacaagaaaaacaaattcttaaatttcaccatatttctgggaggggtaattgggtgataagtggaggtgctttgttgatcttgttttgcgaaatccagcccctagaccaagtagattatttgtgggtaggccagtaaatcttagcaggtgcaaacttcattcaaatgtttggagtcataaatgttatgtttctttttgttgtattaaaaaaaaaacctgaatagtgaatattgcccctcaccctccaccgccagaagactgaattgaccaaaattactctttataaatttctgctttttcctgcactttgtttagccatctttgggctctcagcaaggttgacactgtatatgttaatgaaatgctatttattatgtaaatagtcattttaccctgtggtgcacgtttgagcaaacaaataatgacctaagcacagtatttattgcatcaaatatgtaccacaagaaatgtagagtgcaagctttacacaggtaataaaatgtattctgtaccatttatagatagtttggatgctatcaatgcatgtttatattaccatgctgctgtatctggtttctctcactgctcagaatctcatttatgagaaaccatatgtcagtggtaaagtcaaggaaattgttcaacagatctcatttatttaagtcattaagcaatagtttgcagcactttaacagctttttggttatttttacattttaagtggataacatatggtatatagccagactgtacagacatgtttaaaaaaacacactgcttaacctattaaatatgtgtttagaattttataagcaaatataaatactgtaaaaagtcactttattttatttttcagcattatgtacataaatatgaagaggaaattatcttcaggttgatatcacaatcacttttcttactttctgtccatagtactttttcatgaaagaaatttgctaaataagacatgaaaacaagactgggtagttgtagatttctgctttttaaattacatttgctaattttagattatttcacaattttaaggagcaaaataggttcacgattcatatccaaattatgctttgcaattggaaaagggtttaaaattttatttatatttctggtagtacctgtactaactgaattgaaggtagtgcttatgttatttttgttctttttttctgacttcggtttatgttttcatttctttggagtaatgctgctctagattgttctaaatagaatgtgggcttcataatttttttttccacaaaaacagagtagtcaacttatatagtcaattacatcaggacattttgtgtttcttacagaagcaaaccataggctcctcttttccttaaaactacttagataaactgtattcgtgaactgcatgctggaaaatgctactattatgctaaataatgctaaccaacatttaaaatgtgcaaaactaataaagattacattttttatttt

SEQ ID NO: 31 - DNA, 8380 bp, Homo sapiens
atactgcagaggtctctggtgcatgtgtgtatgtgtgcgtttgtgtgtgtttgtgtgtctgtgtgttctgccccagtgagactgcagcccttgtaaatactttgacaccttttgcaagaaggaatctgaacaattgcaactgaaggcacattgttatcatctcgtctttgggtgatgctgttcctcactgcagatggataattttccttttaatcaggaatttcatatgcagaataaatggtaattaaaatgtgcaggatgacaagatggagcaaacagtgcttgtaccaccaggacctgacagcttcaacttcttcaccagagaatctcttgcggctattgaaagacgcattgcagaagaaaaggcaaagaatcccaaaccagacaaaaaagatgacgacgaaaatggcccaaagccaaatagtgacttggaagctggaaagaaccttccatttatttatggagacattcctccagagatggtgtcagagcccctggaggacctggacccctactatatcaataagaaaacttttatagtattgaataaattgaaggccatcttccggttcagtgccacctctgccctgtacattttaactcccttcaatcctcttaggaaaatagctattaagattttggtacattcattattcagcatgctaattatgtgcactattttgacaaactgtgtgtttatgacaatgagtaaccctcctgattggacaaagaatgtagaatacaccttcacaggaatatatacttttgaatcacttataaaaattattgcaaggggattctgtttagaagattttactttccttcgggatccatggaactggctcgatttcactgtcattacatttgcgtacgtcacagagtttgtggacctgggcaatgtctcggcattgagaacattcagagttctccgagcattgaagacgatttcagtcattccaggcctgaaaaccattgtgggagccctgatccagtctgtgaagaagctctcagatgtaatgatcctgactgtgttctgtctgagcgtatttgctctaattgggctgcagctgttcatgggcaacctgaggaataaatgtatacaatggcctcccaccaatgcttccttggaggaacatagtatagaaaagaatataactgtgaattataatggtacacttataaatgaaactgtctttgagtttgactggaagtcatatattcaagattcaagatatcattatttcctggagggttttttagatgcactactatgtggaaatagctctgatgcaggccaatgtccagagggatatatgtgtgtgaaagctggtagaaatcccaattatggctacacaagctttgataccttcagttgggcttttttgtccttgtttcgactaatgactcaggacttctgggaaaatctttatcaactgacattacgtgctgctgggaaaacgtacatgatattttttgtattggtcattttcttgggctcattctacctaataaatttgatcctggctgtggtggccatggcctacgaggaacagaatcaggccaccttggaagaagcagaacagaaagaggccgaatttcagcagatgattgaacagcttaaaaagcaacaggaggcagctcagcaggcagcaacggcaactgcctcagaacattccagagagcccagtgcagcaggcaggctctcagacagctcatctgaagcctctaagttgagttccaagagtgctaaggaaagaagaaatcggaggaagaaaagaaaacagaaagagcagtctggtggggaagagaaagatgaggatgaattccaaaaatctgaatctgaggacagcatcaggaggaaaggttttcgcttctccattgaagggaaccgattgacatatgaaaagaggtactcctccccacaccagtctttgttgagcatccgtggctccctattttcaccaaggcgaaatagcagaacaagccttttcagctttagagggcgagcaaaggatgtgggatctgagaacgacttcgcagatgatgagcacagcacctttgaggataacgagagccgtagagattccttgtttgtgccccgacgacacggagagagacgcaacagcaacctgagtcagaccagtaggtcatcccggatgctggcagtgtttccagcgaatgggaagatgcacagcactgtggattgcaatggtgtggtttccttggttggtggaccttcagttcctacatcgcctgttggacagcttctgccagaggtgataatagataagccagctactgatgacaatggaacaaccactgaaactgaaatgagaaagagaaggtcaagttctttccacgtttccatggactttctagaagatccttcccaaaggcaacgagcaatgagtatagccagcattctaacaaatacagtagaagaacttgaagaatccaggcagaaatgcccaccctgttggtataaattttccaacatattcttaatctgggactgttctccatattggttaaaagtgaaacatgttgtcaacctggttgtgatggacccatttgttgacctggccatcaccatctgtattgtcttaaatactcttttcatggccatggagcactatccaatgacggaccatttcaataatgtgcttacagtaggaaacttggttttcactgggatctttacagcagaaatgtttctgaaaattattgccatggatccttactattatttccaagaaggctggaatatctttgacggttttattgtgacgcttagcctggtagaacttggactcgccaatgtggaaggattatctgttctccgttcatttcgattgctgcgagttttcaagttggcaaaatcttggccaacgttaaatatgctaataaagatcatcggcaattccgtgggggctctgggaaatttaaccctcgtcttggccatcatcgtcttcatttttgccgtggtcggcatgcagctctttggtaaaagctacaaagattgtgtctgcaagatcgccagtgattgtcaactcccacgctggcacatgaatgacttcttccactccttcctgattgtgttccgcgtgctgtgtggggagtggatagagaccatgtgggactgtatggaggttgctggtcaagccatgtgccttactgtcttcatgatggtcatggtgattggaaacctagtggtcctgaatctctttctggccttgcttctgagctcatttagtgcagacaaccttgcagccactgatgatgataatgaaatgaataatctccaaattgctgtggataggatgcacaaaggagtagcttatgtgaaaagaaaaatatatgatttattcaacagtccttcattaggaaacaaaagattttagatgaaattaaaccacttgatgatctaaacaacaagaaagacagttgtatgtccaatcatacaacagaaattgggaaagatcttgactatcttaaagatgtaaatggaactacaagtggtataggaactggcagcagtgttgaaaaatacattattgatgaaagtgattacatgtcattcataaacaaccccagtcttactgtgactgtaccaattgctgtaggagaatctgactttgaaaatttaaacacggaagactttagtagtgaatcggatctggaagaaagcaaagagaaactgaatgaaagcagtagctcatcagaaggtagcactgtggacatcggcgcacctgtagaagaacagcccgtagtggaacctgaagaaactcttgaaccagaagcttgtttcactgaaggctgtgtacaaagattcaagtgttgtcaaatcaatgtggaagaaggcagaggaaaacaatggtggaacctgagaaggacgtgtttccgaatagttgaacataactggtttgagaccttcattgttttcatgattctccttagtagtggtgctctggcatttgaagatatatatattgatcagcgaaagacgattaagacgatgttggaatatgctgacaaggttttcacttacattttcattctggaaatgcttctaaaatgggtggcatatggctatcaaacatatttcaccaatgcctggtgttggctggacttcttaattgttgatgtttcattggtcagtttaacagcaaatgccttgggttactcagaacttggagccatcaaatctctcaggacactaagagctctgagacctctaagagccttatctcgatttgaagggatgagggtggttgtgaatgcccttttaggagcaattccatccatcatgaatgtgcttctggtttgtcttatattctggctaattttcagcatcatgggcgtaaatttgtttgctggcaaattctaccactgtattaacaccacaactggtgacaggtttgacatcgaagacgtgaataatcatactgattgcctaaaactaatagaaagaaatgagactgctcgatggaaaaatgtgaaagtaaactttgataatgtaggatttgggtatctctctttgcttcaagttgccacattcaaaggatggatggatataatgtatgcagcagttgattccagaaatgtggaactccagcctaagtatgaaaaaagtctgtacatgtatctttactttgttattttcatcatctttgggtccttcttcaccttgaacctgtttattggtgtcatcatagataatttcaaccagcagaaaaagaagtttggaggtcaagacatctttatgacagaagaacagaagaaatactataatgcaatgaaaaaattaggatcgaaaaaaccgcaaaagcctatacctcgaccaggaaacaaatttcaaggaatggtctttgacttcgtaaccagacaagtttttgacataagcatcatgattctcatctgtcttaacatggtcacaatgatggtggaaacagatgaccagagtgaatatgtgactaccattttgtcacgcatcaatctggtgttcattgtgctatttactggagagtgtgtactgaaactcatctctctacgccattattattttaccattggatggaatatttttgattttgtggttgtcattctctccattgtaggtatgtttcttgccgagctgatagaaaagtatttcgtgtcccctaccctgttccgagtgatccgtcttgctaggattggccgaatcctacgtctgatcaaaggagcaaaggggatccgcacgctgctctttgctttgatgatgtcccttcctgcgttgtttaacatcggcctcctactcttcctagtcatgttcatctacgccatctttgggatgtccaactttgcctatgttaagagggaagttgggatcgatgacatgttcaactttgagacctttggcaacagcatgatctgcctattccaaattacaacctctgctggctgggatggattgctagcacccattctcaacagtaagccacccgactgtgaccctaataaagttaaccctggaagctcagttaagggagactgtgggaacccatctgttggaattttcttttttgtcagttacatcatcatatccttcctggttgtggtgaacatgtacatcgcggtcatcctggagaacttcagtgttgctactgaagaaagtgcagagcctctgagtgaggatgactttgagatgttctatgaggtttgggagaagtttgatcccgatgcaactcagttcatggaatttgaaaaattatctcagtttgcagctgcgcttgaaccgcctctcaatctgccacaaccaaacaaactccagctcattgccatggatttgcccatggtgagtggtgaccggatccactgtcttgatatcttatttgcttttacaaagcgggttctaggagagagtggagagatggatgctctacgaatacagatggaagagcgattcatggcttccaatccttccaaggtctcctatcagccaatcactactactttaaaacgaaaacaagaggaagtatctgctgtcattattcagcgtgcttacagacgccaccttttaaagcgaactgtaaaacaagcttcctttacgtacaataaaaacaaaatcaaaggtggggctaatcttcttataaaagaagacatgataattgacagaataaatgaaaactctattacagaaaaaactgatctgaccatgtccactgcagcttgtccaccttcctatgaccgggtgacaaagccaattgtggaaaaacatgagcaagaaggcaaagatgaaaaagccaaagggaaataaatgaaaataaataaaaataattgggtgacaaattgtttacagcctgtgaaggtgatgtatttttatcaacaggactcctttaggaggtcaatgccaaactgactgtttttacacaaatctccttaaggtcagtgcctacaataagacagtgaccccttgtcagcaaactgtgactctgtgtaaaggggagatgaccttgacaggaggttactgttctcactaccagctgacactgctgaagataagatgcacaatggctagtcagactgtagggaccagtttcaaggggtgcaaacctgtgattttggggttgtttaacatgaaacactttagtgtagtaattgtatccactgtttgcatttcaactgccacatttgtcacatttttatggaatctgttagtggattcatctttttgttaatccatgtgtttattatatgtgactatttttgtaaacgaagtttctgttgagaaataggctaaggacctctataacaggtatgccacctggggggtatggcaaccacatggccctcccagctacacaaagtcgtggtttgcatgagggcatgctgcacttagagatcatgcatgagaaaaagtcacaagaaaaacaaattcttaaatttcaccatatttctgggaggggtaattgggtgataagtggaggtgctttgttgatcttgttttgcgaaatccagcccctagaccaagtagattatttgtgggtaggccagtaaatcttagcaggtgcaaacttcattcaaatgtttggagtcataaatgttatgtttctttttgttgtattaaaaaaaaaacctgaatagtgaatattgcccctcaccctccaccgccagaagactgaattgaccaaaattactctttataaatttctgctttttcctgcactttgtttagccatctttgggctctcagcaaggttgacactgtatatgttaatgaaatgctatttattatgtaaatagtcattttaccctgtggtgcacgtttgagcaaacaaataatgacctaagcacagtatttattgcatcaaatatgtaccacaagaaatgtagagtgcaagctttacacaggtaataaaatgtattctgtaccatttatagatagtttggatgctatcaatgcatgtttatattaccatgctgctgtatctggtttctctcactgctcagaatctcatttatgagaaaccatatgtcagtggtaaagtcaaggaaattgttcaacagatctcatttatttaagtcattaagcaatagtttgcagcactttaacagctttttggttatttttacattttaagtggataacatatggtatatagccagactgtacagacatgtttaaaaaaacacactgcttaacctattaaatatgtgtttagaattttataagcaaatataaatactgtaaaaagtcactttattttatttttcagcattatgtacataaatatgaagaggaaattatcttcaggttgatatcacaatcacttttcttactttctgtccatagtactttttcatgaaagaaatttgctaaataagacatgaaaacaagactgggtagttgtagatttctgctttttaaattacatttgctaattttagattatttcacaattttaaggagcaaaataggttcacgattcatatccaaattatgctttgcaattggaaaagggtttaaaattttatttatatttctggtagtacctgtactaactgaattgaaggtagtgcttatgttatttttgttctttttttctgacttcggtttatgttttcatttctttggagtaatgctgctctagattgttctaaatagaatgtgggcttcataatttttttttccacaaaaacagagtagtcaacttatatagtcaattacatcaggacattttgtgtttcttacagaagcaaaccataggctcctcttttccttaaaactacttagataaactgtattcgtgaactgcatgctggaaaatgctactattatgctaaataatgctaaccaacatttaaaatgtgcaaaactaataaagattacattttttatttt

SEQ ID NO: 32 - DNA, 8380 bp, Homo sapiens
atactgcagaggtctctggtgcatgtgtgtatgtgtgcgtttgtgtgtgtttgtgtgtctgtgtgttctgccccagtgagactgcagcccttgtaaatactttgacaccttttgcaagaaggaatctgaacaattgcaactgaaggcacattgttatcatctcgtctttgggtgatgctgttcctcactgcagatggataattttccttttaatcaggaatttcatatgcagaataaatggtaattaaaatgtgcaggatgacaagatggagcaaacagtgcttgtaccaccaggacctgacagcttcaacttcttcaccagagaatctcttgcggctattgaaagacgcattgcagaagaaaaggcaaagaatcccaaaccagacaaaaaagatgacgacgaaaatggcccaaagccaaatagtgacttggaagctggaaagaaccttccatttatttatggagacattcctccagagatggtgtcagagcccctggaggacctggacccctactatatcaataagaaaacttttatagtattgaataaattgaaggccatcttccggttcagtgccacctctgccctgtacattttaactcccttcaatcctcttaggaaaatagctattaagattttggtacattcattattcagcatgctaattatgtgcactattttgacaaactgtgtgtttatgacaatgagtaaccctcctgattggacaaagaatgtagaatacaccttcacaggaatatatacttttgaatcacttataaaaattattgcaaggggattctgtttagaagattttactttccttcgggatccatggaactggctcgatttcactgtcattacatttgcgtacgtcacagagtttgtggacctgggcaatgtctcggcattgagaacattcagagttctccgagcattgaagacgatttcagtcattccaggcctgaaaaccattgtgggagccctgatccagtctgtgaagaagctctcagatgtaatgatcctgactgtgttctgtctgagcgtatttgctctaattgggctgcagctgttcatgggcaacctgaggaataaatgtatacaatggcctcccaccaatgcttccttggaggaacatagtatagaaaagaatataactgtgaattataatggtacacttataaatgaaactgtctttgagtttgactggaagtcatatattcaagattcaagatatcattatttcctggagggttttttagatgcactactatgtggaaatagctctgatgcaggccaatgtccagagggatatatgtgtgtgaaagctggtagaaatcccaattatggctacacaagctttgataccttcagttgggcttttttgtccttgtttcgactaatgactcaggacttctgggaaaatctttatcaactgacattacgtgctgctgggaaaacgtacatgatattttttgtattggtcattttcttgggctcattctacctaataaatttgatcctggctgtggtggccatggcctacgaggaacagaatcaggccaccttggaagaagcagaacagaaagaggccgaatttcagcagatgattgaacagcttaaaaagcaacaggaggcagctcagcaggcagcaacggcaactgcctcagaacattccagagagcccagtgcagcaggcaggctctcagacagctcatctgaagcctctaagttgagttccaagagtgctaaggaaagaagaaatcggaggaagaaaagaaaacagaaagagcagtctggtggggaagagaaagatgaggatgaattccaaaaatctgaatctgaggacagcatcaggaggaaaggttttcgcttctccattgaagggaaccgattgacatatgaaaagaggtactcctccccacaccagtctttgttgagcatccgtggctccctattttcaccaaggcgaaatagcagaacaagccttttcagctttagagggcgagcaaaggatgtgggatctgagaacgacttcgcagatgatgagcacagcacctttgaggataacgagagccgtagagattccttgtttgtgccccgacgacacggagagagacgcaacagcaacctgagtcagaccagtaggtcatcccggatgctggcagtgtttccagcgaatgggaagatgcacagcactgtggattgcaatggtgtggtttccttggttggtggaccttcagttcctacatcgcctgttggacagcttctgccagaggtgataatagataagccagctactgatgacaatggaacaaccactgaaactgaaatgagaaagagaaggtcaagttctttccacgtttccatggactttctagaagatccttcccaaaggcaacgagcaatgagtatagccagcattctaacaaatacagtagaagaacttgaagaatccaggcagaaatgcccaccctgttggtataaattttccaacatattcttaatctgggactgttctccatattggttaaaagtgaaacatgttgtcaacctggttgtgatggacccatttgttgacctggccatcaccatctgtattgtcttaaatactcttttcatggccatggagcactatccaatgacggaccatttcaataatgtgcttacagtaggaaacttggttttcactgggatctttacagcagaaatgtttctgaaaattattgccatggatccttactattatttccaagaaggctggaatatctttgacggttttattgtgacgcttagcctggtagaacttggactcgccaatgtggaaggattatctgttctccgttcatttcgattgctgcgagttttcaagttggcaaaatcttggccaacgttaaatatgctaataaagatcatcggcaattccgtgggggctctgggaaatttaaccctcgtcttggccatcatcgtcttcatttttgccgtggtcggcatgcagctctttggtaaaagctacaaagattgtgtctgcaagatcgccagtgattgtcaactcccacgctggcacatgaatgacttcttccactccttcctgattgtgttccgcgtgctgtgtggggagtggatagagaccatgtgggactgtatggaggttgctggtcaagccatgtgccttactgtcttcatgatggtcatggtgattggaaacctagtggtcctgaatctctttctggccttgcttctgagctcatttagtgcagacaaccttgcagccactgatgatgataatgaaatgaataatctccaaattgctgtggataggatgcacaaaggagtagcttatgtgaaaagaaaaatatatgaatttattcaacagtccttcattaggaaacaaaagattttagatgaaattaaaccacttgatgatctaaacaacaagaaagacagttgtatgtccaatcatacaacagaaattgggaaagatcttgactatcttaaagatgtaaatggaactacaagtggtataggaactggcagcagtgttgaaaaatacattattgatgaaagtgattacatgtcattcataaacaaccccagtcttactgtgactgtaccaattgctgtaggagaatctgactttgaaaatttaaacacggaagactttagtagtgaatcggatctggaagaaagcaaagagaaactgaatgaaagcagtagctcatcagaaggagcactgtggacatcggcgcacctgtagaagaacagcccgtagtggaacctgaagaaactcttgaaccagaagcttgtttcactgaaggctgtgtacaaagattcaagtgttgtcaaatcaatgtggaagaaggcagaggaaaacaatggtggaacctgagaaggacgtgtttccgaatagttgaacataactggtttgagaccttcattgttttcatgattctccttagtagtggtgctctggcatttgaagatatatatattgatcagcgaaagacgattaagacgatgttggaatatgctgacaaggttttcacttacattttcattctggaaatgcttctaaaatgggtggcatatggctatcaaacatatttcaccaatgcctggtgttggctggacttcttaattgttgatgtttcattggtcagtttaacagcaaatgccttgggttactcagaacttggagccatcaaatctctcaggacactaagagctctgagacctctaagagccttatctcgatttgaagggatgagggtggttgtgaatgcccttttaggagcaattccatccatcatgaatgtgcttctggtttgtcttatattctggctaattttcagcatcatgggcgtaaatttgtttgctggcaaattctaccactgtattaacaccacaactggtgacaggtttgacatcgaagacgtgaataatcatactgattgcctaaaactaatagaaagaaatgagactgctcgatggaaaaatgtgaaagtaaactttgataatgtaggatttgggtatctctctttgcttcaagttgccacattcaaaggatggatggatataatgtatgcagcagttgattccagaaatgtggaactccagcctaagtatgaaaaaagtctgtacatgtatctttactttgttattttcatcatctttgggtccttcttcaccttgaacctgtttattggtgtcatcatagataatttcaaccagcagaaaaagaagtttggaggtcaagacatctttatgacagaagaacagaagaaatactataatgcaatgaaaaaattaggatcgaaaaaaccgcaaaagcctatacctcgaccaggaaacaaatttcaaggaatggtctttgacttcgtaaccagacaagtttttgacataagcatcatgattctcatctgtcttaacatggtcacaatgatggtggaaacagatgaccagagtgaatatgtgactaccattttgtcacgcatcaatctggtgttcattgtgctatttactggagagtgtgtactgaaactcatctctctacgccattattattttaccattggatggaatatttttgattttgtggttgtcattctctccattgtaggtatgtttcttgccgagctgatagaaaagtatttcgtgtcccctaccctgttccgagtgatccgtcttgctaggattggccgaatcctacgtctgatcaaaggagcaaaggggatccgcacgctgctctttgctttgatgatgtcccttcctgcgttgtttaacatcggcctcctactcttcctagtcatgttcatctacgccatctttgggatgtccaactttgcctatgttaagagggaagttgggatcgatgacatgttcaactttgagacctttggcaacagcatgatctgcctattccaaattacaacctctgctggctgggatggattgctagcacccattctcaacagtaagccacccgactgtgaccctaataaagttaaccctggaagctcagttaagggagactgtgggaacccatctgttggaattttcttttttgtcagttacatcatcatatccttcctggttgtggtgaacatgtacatcgcggtcatcctggagaacttcagtgttgctactgaagaaagtgcagagcctctgagtgaggatgactttgagatgttctatgaggtttgggagaagtttgatcccgatgcaactcagttcatggaatttgaaaaattatctcagtttgcagctgcgcttgaaccgcctctcaatctgccacaaccaaacaaactccagctcattgccatggatttgcccatggtgagtggtgaccggatccactgtcttgatatcttatttgcttttacaaagcgggttctaggagagagtggagagatggatgctctacgaatacagatggaagagcgattcatggcttccaatccttccaaggtctcctatcagccaatcactactactttaaaacgaaaacaagaggaagtatctgctgtcattattcagcgtgcttacagacgccaccttttaaagcgaactgtaaaacaagcttcctttacgtacaataaaaacaaaatcaaaggtggggctaatcttcttataaaagaagacatgataattgacagaataaatgaaaactctattacagaaaaaactgatctgaccatgtccactgcagcttgtccaccttcctatgaccgggtgacaaagccaattgtggaaaaacatgagcaagaaggcaaagatgaaaaagccaaagggaaataaatgaaaataaataaaaataattgggtgacaaattgtttacagcctgtgaaggtgatgtatttttatcaacaggactcctttaggaggtcaatgccaaactgactgtttttacacaaatctccttaaggtcagtgcctacaataagacagtgaccccttgtcagcaaactgtgactctgtgtaaaggggagatgaccttgacaggaggttactgttctcactaccagctgacactgctgaagataagatgcacaatggctagtcagactgtagggaccagtttcaaggggtgcaaacctgtgattttggggttgtttaacatgaaacactttagtgtagtaattgtatccactgtttgcatttcaactgccacatttgtcacatttttatggaatctgttagtggattcatctttttgttaatccatgtgtttattatatgtgactatttttgtaaacgaagtttctgttgagaaataggctaaggacctctataacaggtatgccacctggggggtatggcaaccacatggccctcccagctacacaaagtcgtggtttgcatgagggcatgctgcacttagagatcatgcatgagaaaaagtcacaagaaaaacaaattcttaaatttcaccatatttctgggaggggtaattgggtgataagtggaggtgctttgttgatcttgttttgcgaaatccagcccctagaccaagtagattatttgtgggtaggccagtaaatcttagcaggtgcaaacttcattcaaatgtttggagtcataaatgttatgtttctttttgttgtattaaaaaaaaaacctgaatagtgaatattgcccctcaccctccaccgccagaagactgaattgaccaaaattactctttataaatttctgctttttcctgcactttgtttagccatctttgggctctcagcaaggttgacactgtatatgttaatgaaatgctatttattatgtaaatagtcattttaccctgtggtgcacgtttgagcaaacaaataatgacctaagcacagtatttattgcatcaaatatgtaccacaagaaatgtagagtgcaagctttacacaggtaataaaatgtattctgtaccatttatagatagtttggatgctatcaatgcatgtttatattaccatgctgctgtatctggtttctctcactgctcagaatctcatttatgagaaaccatatgtcagtggtaaagtcaaggaaattgttcaacagatctcatttatttaagtcattaagcaatagtttgcagcactttaacagctttttggttatttttacattttaagtggataacatatggtatatagccagactgtacagacatgtttaaaaaaacacactgcttaacctattaaatatgtgtttagaattttataagcaaatataaatactgtaaaaagtcactttattttatttttcagcattatgtacataaatatgaagaggaaattatcttcaggttgatatcacaatcacttttcttactttctgtccatagtactttttcatgaaagaaatttgctaaataagacatgaaaacaagactgggtagttgtagatttctgctttttaaattacatttgctaattttagattatttcacaattttaaggagcaaaataggttcacgattcatatccaaattatgctttgcaattggaaaagggtttaaaattttatttatatttctggtagtacctgtactaactgaattgaaggtagtgcttatgttatttttgttctttttttctgacttcggtttatgttttcatttctttggagtaatgctgctctagattgttctaaatagaatgtgggcttcataatttttttttccacaaaaacagagtagtcaacttatatagtcaattacatcaggacattttgtgtttcttacagaagcaaaccataggctcctcttttccttaaaactacttagataaactgtattcgtgaactgcatgctggaaaatgctactattatgctaaataatgctaaccaacatttaaaatgtgcaaaactaataaagattacattttttatttt

SEQ ID NO: 33 - DNA, 8382 bp, Homo sapiens
atactgcagaggtctctggtgcatgtgtgtatgtgtgcgtttgtgtgtgtttgtgtgtctgtgtgttctgccccagtgagactgcagcccttgtaaatactttgacaccttttgcaagaaggaatctgaacaattgcaactgaaggcacattgttatcatctcgtctttgggtgatgctgttcctcactgcagatggataattttccttttaatcaggaatttcatatgcagaataaatggtaattaaaatgtgcaggatgacaagatggagcaaacagtgcttgtaccaccaggacctgacagcttcaacttcttcaccagagaatctcttgcggctattgaaagacgcattgcagaagaaaaggcaaagaatcccaaaccagacaaaaaagatgacgacgaaaatggcccaaagccaaatagtgacttggaagctggaaagaaccttccatttatttatggagacattcctccagagatggtgtcagagcccctggaggacctggacccctactatatcaataagaaaacttttatagtattgaataaattgaaggccatcttccggttcagtgccacctctgccctgtacattttaactcccttcaatcctcttaggaaaatagctattaagattttggtacattcattattcagcatgctaattatgtgcactattttgacaaactgtgtgtttatgacaatgagtaaccctcctgattggacaaagaatgtagaatacaccttcacaggaatatatacttttgaatcacttataaaaattattgcaaggggattctgtttagaagattttactttccttcgggatccatggaactggctcgatttcactgtcattacatttgcgtacgtcacagagtttgtggacctgggcaatgtctcggcattgagaacattcagagttctccgagcattgaagacgatttcagtcattccaggcctgaaaaccattgtgggagccctgatccagtctgtgaagaagctctcagatgtaatgatcctgactgtgttctgtctgagcgtatttgctctaattgggctgcagctgttcatgggcaacctgaggaataaatgtatacaatggcctcccaccaatgcttccttggaggaacatagtatagaaaagaatataactgtgaattataatggtacacttataaatgaaactgtctttgagtttgactggaagtcatatattcaagattcaagatatcattatttcctggagggttttttagatgcactactatgtggaaatagctctgatgcaggccaatgtccagagggatatatgtgtgtgaaagctggtagaaatcccaattatggctacacaagctttgataccttcagttgggcttttttgtccttgtttcgactaatgactcaggacttctgggaaaatctttatcaactgacattacgtgctgctgggaaaacgtacatgatattttttgtattggtcattttcttgggctcattctacctaataaatttgatcctggctgtggtggccatggcctacgaggaacagaatcaggccaccttggaagaagcagaacagaaagaggccgaatttcagcagatgattgaacagcttaaaaagcaacaggaggcagctcagcaggcagcaacggcaactgcctcagaacattccagagagcccagtgcagcaggcaggctctcagacagctcatctgaagcctctaagttgagttccaagagtgctaaggaaagaagaaatcggaggaagaaaagaaaacagaaagagcagtctggtggggaagagaaagatgaggatgaattccaaaaatctgaatctgaggacagcatcaggaggaaaggttttcgcttctccattgaagggaaccgattgacatatgaaaagaggtactcctccccacaccagtctttgttgagcatccgtggctccctattttcaccaaggcgaaatagcagaacaagccttttcagctttagagggcgagcaaaggatgtgggatctgagaacgacttcgcagatgatgagcacagcacctttgaggataacgagagccgtagagattccttgtttgtgccccgacgacacggagagagacgcaacagcaacctgagtcagaccagtaggtcatcccggatgctggcagtgtttccagcgaatgggaagatgcacagcactgtggattgcaatggtgtggtttccttggttggtggaccttcagttcctacatcgcctgttggacagcttctgccagaggtgataatagataagccagctactgatgacaatggaacaaccactgaaactgaaatgagaaagagaaggtcaagttctttccacgtttccatggactttctagaagatccttcccaaaggcaacgagcaatgagtatagccagcattctaacaaatacagtagaagaacttgaagaatccaggcagaaatgcccaccctgttggtataaattttccaacatattcttaatctgggactgttctccatattggttaaaagtgaaacatgttgtcaacctggttgtgatggacccatttgttgacctggccatcaccatctgtattgtcttaaatactcttttcatggccatggagcactatccaatgacggaccatttcaataatgtgcttacagtaggaaacttggttttcactgggatctttacagcagaaatgtttctgaaaattattgccatggatccttactattatttccaagaaggctggaatatctttgacggttttattgtgacgcttagcctggtagaacttggactcgccaatgtggaaggattatctgttctccgttcatttcgattgctgcgagttttcaagttggcaaaatcttggccaacgttaaatatgctaataaagatcatcggcaattccgtgggggctctgggaaatttaaccctcgtcttggccatcatcgtcttcatttttgccgtggtcggcatgcagctctttggtaaaagctacaaagattgtgtctgcaagatcgccagtgattgtcaactcccacgctggcacatgaatgacttcttccactccttcctgattgtgttccgcgtgctgtgtggggagtggatagagaccatgtgggactgtatggaggttgctggtcaagccatgtgccttactgtcttcatgatggtcatggtgattggaaacctagtggtcctgaatctctttctggccttgcttctgagctcatttagtgcagacaaccttgcagccactgatgatgataatgaaatgaataatctccaaattgctgtggataggatgcacaaaggagtagcttatgtgaaaagaaaaatatatgaatttattcaacagtccttcattaggaaacaaaagattttagatgaaattaaaccacttgatgatctaaacaacaagaaagacagttgtatgtccaatcatacaacagaaattgggaaagatcttgactatcttaaagatgtaaatggaactacaagtggtataggaactggcagcagtgttgaaaaatacattattgatgaaagtgattacatgtcattcataaacaaccccagtcttactgtgactgtaccaattgctgtaggagaatctgactttgaaaatttaaacacggaagactttagtagtgaatcggatctggaagaaagcaaagagaaactgaatgaaagcagtagctcatcagaaggtagcactgtggacatcggcgcacctgtagaagaacagcccgtagtggaacctgaagaaactcttgaaccagaagcttgtttcactgaaggctgtgtacaaagattcaagtgttgtcaaatcaatgtggaagaaggcagaggaaaacaatggtggaacctgagaaggacgtgtttccgaatagttgaacataactggtttgagaccttcattgttttcatgattctccttagtagtggtgctctggcatttgaagatatatatattgatcagcgaaagacgattaagacgatgttggaatatgctgacaaggttttcacttacattttcattctggaaatgcttctaaaatgggtggcatatggctatcaaacatatttcaccaatgcctggtgttggctggacttcttaattgttgatgtttcattggtcagtttaacagcaaatgccttgggttactcagaacttggagccatcaaatctctcaggacactaagagctctgagacctctaagagccttatctcgatttgaagggatgagggtggttgtgaatgcccttttaggagcaattccatccatcatgaatgtgcttctggtttgtcttatattctggctaattttcagcatcatgggcgtaaatttgtttgctggcaaattctaccactgtattaacaccacaactggtgacaggtttgacatcgaagacgtgaataatcatactgattgcctaaaactaatagaaagaaatgagactgctcgatggaaaaatgtgaaagtaaactttgataatgtaggatttgggtatctctctttgcttcaagttgccacattcaaaggatggatggatataatgtatgcagcagttgattccagaaatgtggaactccagcctaagtatgaaaaaagtctgtacatgtatctttactttgttattttcatcatctttgggtccttcttcaccttgaacctgtttattggtgtcatcatagataatttcaaccagcagaaaaagaagtttggaggtcaagacatctttatgacagaagaacagaagaaatactataatgcaatgaaaaaattaggatcgaaaaaaccgcaaaagcctatacctcgaccaggaaacaaatttcaaggaatggtctttgacttcgtaaccagacaagtttttgacataagcatcatgattctcatctgtcttaacatggtcacaatgatggtggaaacagatgaccagagtgaatatgtgactaccattttgtcacgcatcaatctggtgttcattgtgctatttactggagagtgtgtactgaaactcatctctctacgccattattattttaccattggatggaatatttttgattttgtggttgtcattctctccattgtaggtatgtttcttgccgagctgatagaaaagtatttcgtgtcccctaccctgttccgagtgatccgtcttgctaggattggccgaatcctacgtctgattcaaaggagcaaaggggatccgcacgctgctctttgctttgatgatgtcccttcctgcgttgtttaacatcggcctcctactcttcctagtcatgttcatctacgccatctttgggatgtccaactttgcctatgttaagagggaagttgggatcgatgacatgttcaactttgagacctttggcaacagcatgatctgcctattccaaattacaacctctgctggctgggatggattgctagcacccattctcaacagtaagccacccgactgtgaccctaataaagttaaccctggaagctcagttaagggagactgtgggaacccatctgttggaattttcttttttgtcagttacatcatcatatccttcctggttgtggtgaacatgtacatcgcggtcatcctggagaacttcagtgttgctactgaagaaagtgcagagcctctgagtgaggatgactttgagatgttctatgaggtttgggagaagtttgatcccgatgcaactcagttcatggaatttgaaaaattatctcagtttgcagctgcgcttgaaccgcctctcaatctgccacaaccaaacaaactccagctcattgccatggatttgcccatggtgagtggtgaccggatccactgtcttgatatcttatttgcttttacaaagcgggttctaggagagagtggagagatggatgctctacgaatacagatggaagagcgattcatggcttccaatccttccaaggtctcctatcagccaatcactactactttaaaacgaaaacaagaggaagtatctgctgtcattattcagcgtgcttacagacgccaccttttaaagcgaactgtaaaacaagcttcctttacgtacaataaaaacaaaatcaaaggtggggctaatcttcttataaaagaagacatgataattgacagaataaatgaaaactctattacagaaaaaactgatctgaccatgtccactgcagcttgtccaccttcctatgaccgggtgacaaagccaattgtggaaaaacatgagcaagaaggcaaagatgaaaaagccaaagggaaataaatgaaaataaataaaaataattgggtgacaaattgtttacagcctgtgaaggtgatgtatttttatcaacaggactcctttaggaggtcaatgccaaactgactgtttttacacaaatctccttaaggtcagtgcctacaataagacagtgaccccttgtcagcaaactgtgactctgtgtaaaggggagatgaccttgacaggaggttactgttctcactaccagctgacactgctgaagataagatgcacaatggctagtcagactgtagggaccagtttcaaggggtgcaaacctgtgattttggggttgtttaacatgaaacactttagtgtagtaattgtatccactgtttgcatttcaactgccacatttgtcacatttttatggaatctgttagtggattcatctttttgttaatccatgtgtttattatatgtgactatttttgtaaacgaagtttctgttgagaaataggctaaggacctctataacaggtatgccacctggggggtatggcaaccacatggccctcccagctacacaaagtcgtggtttgcatgagggcatgctgcacttagagatcatgcatgagaaaaagtcacaagaaaaacaaattcttaaatttcaccatatttctgggaggggtaattgggtgataagtggaggtgctttgttgatcttgttttgcgaaatccagcccctagaccaagtagattatttgtgggtaggccagtaaatcttagcaggtgcaaacttcattcaaatgtttggagtcataaatgttatgtttctttttgttgtattaaaaaaaaaacctgaatagtgaatattgcccctcaccctccaccgccagaagactgaattgaccaaaattactctttataaatttctgctttttcctgcactttgtttagccatctttgggctctcagcaaggttgacactgtatatgttaatgaaatgctatttattatgtaaatagtcattttaccctgtggtgcacgtttgagcaaacaaataatgacctaagcacagtatttattgcatcaaatatgtaccacaagaaatgtagagtgcaagctttacacaggtaataaaatgtattctgtaccatttatagatagtttggatgctatcaatgcatgtttatattaccatgctgctgtatctggtttctctcactgctcagaatctcatttatgagaaaccatatgtcagtggtaaagtcaaggaaattgttcaacagatctcatttatttaagtcattaagcaatagtttgcagcactttaacagctttttggttatttttacattttaagtggataacatatggtatatagccagactgtacagacatgtttaaaaaaacacactgcttaacctattaaatatgtgtttagaattttataagcaaatataaatactgtaaaaagtcactttattttatttttcagcattatgtacataaatatgaagaggaaattatcttcaggttgatatcacaatcacttttcttactttctgtccatagtactttttcatgaaagaaatttgctaaataagacatgaaaacaagactgggtagttgtagatttctgctttttaaattacatttgctaattttagattatttcacaattttaaggagcaaaataggttcacgattcatatccaaattatgctttgcaattggaaaagggtttaaaattttatttatatttctggtagtacctgtactaactgaattgaaggtagtgcttatgttatttttgttctttttttctgacttcggtttatgttttcatttctttggagtaatgctgctctagattgttctaaatagaatgtgggcttcataatttttttttccacaaaaacagagtagtcaacttatatagtcaattacatcaggacattttgtgtttcttacagaagcaaaccataggctcctcttttccttaaaactacttagataaactgtattcgtgaactgcatgctggaaaatgctactattatgctaaataatgctaaccaacatttaaaatgtgcaaaactaataaagattacattttttatttt

SEQ ID NO: 34 - DNA, 8381 bp, Homo sapiens
atactgcagaggtctctggtgcatgtgtgtatgtgtgcgtttgtgtgtgtttgtgtgtctgtgtgttctgccccagtgagactgcagcccttgtaaatactttgacaccttttgcaagaaggaatctgaacaattgcaactgaaggcacattgttatcatctcgtctttgggtgatgctgttcctcactgcagatggataattttccttttaatcaggaatttcatatgcagaataaatggtaattaaaatgtgcaggatgacaagatggagcaaacagtgcttgtaccaccaggacctgacagcttcaacttcttcaccagagaatctcttgcggctattgaaagacgcattgcagaagaaaaggcaaagaatcccaaaccagacaaaaaagatgacgacgaaaatggcccaaagccaaatagtgacttggaagctggaaagaaccttccatttatttatggagacattcctccagagatggtgtcagagcccctggaggacctggacccctactatatcaataagaaaacttttatagtattgaataaattgaaggccatcttccggttcagtgccacctctgccctgtacattttaactcccttcaatcctcttaggaaaatagctattaagattttggtacattcattattcagcatgctaattatgtgcactattttgacaaactgtgtgtttatgacaatgagtaaccctcctgattggacaaagaatgtagaatacaccttcacaggaatatatacttttgaatcacttataaaaattattgcaaggggattctgtttagaagattttactttccttcgggatccatggaactggctcgatttcactgtcattacatttgcgtacgtcacagagtttgtggacctgggcaatgtctcggcattgagaacattcagagttctccgagcattgaagacgatttcagtcattccaggcctgaaaaccattgtgggagccctgatccagtctgtgaagaagctctcagatgtaatgatcctgactgtgttctgtctgagcgtatttgctctaattgggctgcagctgttcatgggcaacctgaggaataaatgtatacaatggcctcccaccaatgcttccttggaggaacatagtatagaaaagaatataactgtgaattataatggtacacttataaatgaaactgtctttgagtttgactggaagtcatatattcaagattcaagatatcattatttcctggagggttttttagatgcactactatgtggaaatagctctgatgcaggccaatgtccagagggatatatgtgtgtgaaagctggtagaaatcccaattatggctacacaagctttgataccttcagttgggcttttttgtccttgtttcgactaatgactcaggacttctgggaaaatctttatcaactgacattacgtgctgctgggaaaacgtacatgatattttttgtattggtcattttcttgggctcattctacctaataaatttgatcctggctgtggtggccatggcctacgaggaacagaatcaggccaccttggaagaagcagaacagaaagaggccgaatttcagcagatgattgaacagcttaaaaagcaacaggaggcagctcagcaggcagcaacggcaactgcctcagaacattccagagagcccagtgcagcaggcaggctctcagacagctcatctgaagcctctaagttgagttccaagagtgctaaggaaagaagaaatcggaggaagaaaagaaaacagaaagagcagtctggtggggaagagaaagatgaggatgaattccaaaaatctgaatctgaggacagcatcaggaggaaaggttttcgcttctccattgaagggaaccgattgacatatgaaaagaggtactcctccccacaccagtctttgttgagcatccgtggctccctattttcaccaaggcgaaatagcagaacaagccttttcagctttagagggcgagcaaaggatgtgggatctgagaacgacttcgcagatgatgagcacagcacctttgaggataacgagagccgtagagattccttgtttgtgccccgacgacacggagagagacgcaacagcaacctgagtcagaccggtaggtcatcccggatgctggcagtgtttccagcgaatgggaagatgcacagcactgtggattgcaatggtgtggtttccttggttggtggaccttcagttcctacatcgcctgttggacagcttctgccagaggtgataatagataagccagctactgatgacaatggaacaaccactgaaactgaaatgagaaagagaaggtcaagttctttccacgtttccatggactttctagaagatccttcccaaaggcaacgagcaatgagtatagccagcattctaacaaatacagtagaagaacttgaagaatccaggcagaaatgcccaccctgttggtataaattttccaacatattcttaatctgggactgttctccatattggttaaaagtgaaacatgttgtcaacctggttgtgatggacccatttgttgacctggccatcaccatctgtattgtcttaaatactcttttcatggccatggagcactatccaatgacggaccatttcaataatgtgcttacagtaggaaacttggttttcactgggatctttacagcagaaatgtttctgaaaattattgccatggatccttactattatttccaagaaggctggaatatctttgacggttttattgtgacgcttagcctggtagaacttggactcgccaatgtggaaggattatctgttctccgttcatttcgattgctgcgagttttcaagttggcaaaatcttggccaacgttaaatatgctaataaagatcatcggcaattccgtgggggctctgggaaatttaaccctcgtcttggccatcatcgtcttcatttttgccgtggtcggcatgcagctctttggtaaaagctacaaagattgtgtctgcaagatcgccagtgattgtcaactcccacgctggcacatgaatgacttcttccactccttcctgattgtgttccgcgtgctgtgtggggagtggatagagaccatgtgggactgtatggaggttgctggtcaagccatgtgccttactgtcttcatgatggtcatggtgattggaaacctagtggtcctgaatctctttctggccttgcttctgagctcatttagtgcagacaaccttgcagccactgatgatgataatgaaatgaataatctccaaattgctgtggataggatgcacaaaggagtagcttatgtgaaaagaaaaatatatgaatttattcaacagtccttcattaggaaacaaaagattttagatgaaattaaaccacttgatgatctaaacaacaagaaagacagttgtatgtccaatcatacaacagaaattgggaaagatcttgactatcttaaagatgtaaatggaactacaagtggtataggaactggcagcagtgttgaaaaatacattattgatgaaagtgattacatgtcattcataaacaaccccagtcttactgtgactgtaccaattgctgtaggagaatctgactttgaaaatttaaacacggaagactttagtagtgaatcggatctggaagaaagcaaagagaaactgaatgaaagcagtagctcatcagaaggtagcactgtggacatcggcgcacctgtagaagaacagcccgtagtggaacctgaagaaactcttgaaccagaagcttgtttcactgaaggctgtgtacaaagattcaagtgttgtcaaatcaatgtggaagaaggcagaggaaaacaatggtggaacctgagaaggacgtgtttccgaatagttgaacataactggtttgagaccttcattgttttcatgattctccttagtagtggtgctctggcatttgaagatatatatattgatcagcgaaagacgattaagacgatgttggaatatgctgacaaggttttcacttacattttcattctggaaatgcttctaaaatgggtggcatatggctatcaaacatatttcaccaatgcctggtgttggctggacttcttaattgttgatgtttcattggtcagtttaacagcaaatgccttgggttactcagaacttggagccatcaaatctctcaggacactaagagctctgagacctctaagagccttatctcgatttgaagggatgagggtggttgtgaatgcccttttaggagcaattccatccatcatgaatgtgcttctggtttgtcttatattctggctaattttcagcatcatgggcgtaaatttgtttgctggcaaattctaccactgtattaacaccacaactggtgacaggtttgacatcgaagacgtgaataatcatactgattgcctaaaactaatagaaagaaatgagactgctcgatggaaaaatgtgaaagtaaactttgataatgtaggatttgggtatctctctttgcttcaagttgccacattcaaaggatggatggatataatgtatgcagcagttgattccagaaatgtggaactccagcctaagtatgaaaaaagtctgtacatgtatctttactttgttattttcatcatctttgggtccttcttcaccttgaacctgtttattggtgtcatcatagataatttcaaccagcagaaaaagaagtttggaggtcaagacatctttatgacagaagaacagaagaaatactataatgcaatgaaaaaattaggatcgaaaaaaccgcaaaagcctatacctcgaccaggaaacaaatttcaaggaatggtctttgacttcgtaaccagacaagtttttgacataagcatcatgattctcatctgtcttaacatggtcacaatgatggtggaaacagatgaccagagtgaatatgtgactaccattttgtcacgcatcaatctggtgttcattgtgctatttactggagagtgtgtactgaaactcatctctctacgccattattattttaccattggatggaatatttttgattttgtggttgtcattctctccattgtaggtatgtttcttgccgagctgatagaaaagtatttcgtgtcccctaccctgttccgagtgatccgtcttgctaggattggccgaatcctacgtctgatcaaaggagcaaaggggatccgcacgctgctctttgctttgatgatgtcccttcctgcgttgtttaacatcggcctcctactcttcctagtcatgttcatctacgccatctttgggatgtccaactttgcctatgttaagagggaagttgggatcgatgacatgttcaactttgagacctttggcaacagcatgatctgcctattccaaattacaacctctgctggctgggatggattgctagcacccattctcaacagtaagccacccgactgtgaccctaataaagttaaccctggaagctcagttaagggagactgtgggaacccatctgttggaattttcttttttgtcagttacatcatcatatccttcctggttgtggtgaacatgtacatcgcggtcatcctggagaacttcagtgttgctactgaagaaagtgcagagcctctgagtgaggatgactttgagatgttctatgaggtttgggagaagtttgatcccgatgcaactcagttcatggaatttgaaaaattatctcagtttgcagctgcgcttgaaccgcctctcaatctgccacaaccaaacaaactccagctcattgccatggatttgcccatggtgagtggtgaccggatccactgtcttgatatcttatttgcttttacaaagcgggttctaggagagagtggagagatggatgctctacgaatacagatggaagagcgattcatggcttccaatccttccaaggtctcctatcagccaatcactactactttaaaacgaaaacaagaggaagtatctgctgtcattattcagcgtgcttacagacgccaccttttaaagcgaactgtaaaacaagcttcctttacgtacaataaaaacaaaatcaaaggtggggctaatcttcttataaaagaagacatgataattgacagaataaatgaaaactctattacagaaaaaactgatctgaccatgtccactgcagcttgtccaccttcctatgaccgggtgacaaagccaattgtggaaaaacatgagcaagaaggcaaagatgaaaaagccaaagggaaataaatgaaaataaataaaaataattgggtgacaaattgtttacagcctgtgaaggtgatgtatttttatcaacaggactcctttaggaggtcaatgccaaactgactgtttttacacaaatctccttaaggtcagtgcctacaataagacagtgaccccttgtcagcaaactgtgactctgtgtaaaggggagatgaccttgacaggaggttactgttctcactaccagctgacactgctgaagataagatgcacaatggctagtcagactgtagggaccagtttcaaggggtgcaaacctgtgattttggggttgtttaacatgaaacactttagtgtagtaattgtatccactgtttgcatttcaactgccacatttgtcacatttttatggaatctgttagtggattcatctttttgttaatccatgtgtttattatatgtgactatttttgtaaacgaagtttctgttgagaaataggctaaggacctctataacaggtatgccacctggggggtatggcaaccacatggccctcccagctacacaaagtcgtggtttgcatgagggcatgctgcacttagagatcatgcatgagaaaaagtcacaagaaaaacaaattcttaaatttcaccatatttctgggaggggtaattgggtgataagtggaggtgctttgttgatcttgttttgcgaaatccagcccctagaccaagtagattatttgtgggtaggccagtaaatcttagcaggtgcaaacttcattcaaatgtttggagtcataaatgttatgtttctttttgttgtattaaaaaaaaaacctgaatagtgaatattgcccctcaccctccaccgccagaagactgaattgaccaaaattactctttataaatttctgctttttcctgcactttgtttagccatctttgggctctcagcaaggttgacactgtatatgttaatgaaatgctatttattatgtaaatagtcattttaccctgtggtgcacgtttgagcaaacaaataatgacctaagcacagtatttattgcatcaaatatgtaccacaagaaatgtagagtgcaagctttacacaggtaataaaatgtattctgtaccatttatagatagtttggatgctatcaatgcatgtttatattaccatgctgctgtatctggtttctctcactgctcagaatctcatttatgagaaaccatatgtcagtggtaaagtcaaggaaattgttcaacagatctcatttatttaagtcattaagcaatagtttgcagcactttaacagctttttggttatttttacattttaagtggataacatatggtatatagccagactgtacagacatgtttaaaaaaacacactgcttaacctattaaatatgtgtttagaattttataagcaaatataaatactgtaaaaagtcactttattttatttttcagcattatgtacataaatatgaagaggaaattatcttcaggttgatatcacaatcacttttcttactttctgtccatagtactttttcatgaaagaaatttgctaaataagacatgaaaacaagactgggtagttgtagatttctgctttttaaattacatttgctaattttagattatttcacaattttaaggagcaaaataggttcacgattcatatccaaattatgctttgcaattggaaaagggtttaaaattttatttatatttctggtagtacctgtactaactgaattgaaggtagtgcttatgttatttttgttctttttttctgacttcggtttatgttttcatttctttggagtaatgctgctctagattgttctaaatagaatgtgggcttcataatttttttttccacaaaaacagagtagtcaacttatatagtcaattacatcaggacattttgtgtttcttacagaagcaaaccataggctcctcttttccttaaaactacttagataaactgtattcgtgaactgcatgctggaaaatgctactattatgctaaataatgctaaccaacatttaaaatgtgcaaaactaataaagattacattttttatttt

SEQ ID NO: 35 - DNA, 8381 bp, Homo sapiens
atactgcagaggtctctggtgcatgtgtgtatgtgtgcgtttgtgtgtgtttgtgtgtctgtgtgttctgccccagtgagactgcagcccttgtaaatactttgacaccttttgcaagaaggaatctgaacaattgcaactgaaggcacattgttatcatctcgtctttgggtgatgctgttcctcactgcagatggataattttccttttaatcaggaatttcatatgcagaataaatggtaattaaaatgtgcaggatgacaagatggagcaaacagtgcttgtaccaccaggacctgacagcttcaacttcttcaccagagaatctcttgcggctattgaaagacgcattgcagaagaaaaggcaaagaatcccaaaccagacaaaaaagatgacgacgaaaatggcccaaagccaaatagtgacttggaagctggaaagaaccttccatttatttatggagacattcctccagagatggtgtcagagcccctggaggacctggacccctactatatcaataagaaaacttttatagtattgaataaattgaaggccatcttccggttcagtgccacctctgccctgtacattttaactcccttcaatcctcttaggaaaatagctattaagattttggtacattcattattcagcatgctaattatgtgcactattttgacaaactgtgtgtttatgacaatgagtaaccctcctgattggacaaagaatgtagaatacaccttcacaggaatatatacttttgaatcacttataaaaattattgcaaggggattctgtttagaagattttactttccttcgggatccatggaactggctcgatttcactgtcattacatttgcgtacgtcacagagtttgtggacctgggcaatgtctcggcattgagaacattcagagttctccgagcattgaagacgatttcagtcattccaggcctgaaaaccattgtgggagccctgatccagtctgtgaagaagctctcagatgtaatgatcctgactgtgttctgtctgagcgtatttgctctaattgggctgcagctgttcatgggcaacctgaggaataaatgtatacaatggcctcccaccaatgcttccttggaggaacatagtatagaaaagaatataactgtgaattataatggtacacttataaatgaaactgtctttgagtttgactggaagtcatatattcaagattcaagatatcattatttcctggagggttttttagatgcactactatgtggaaatagctctgatgcaggccaatgtccagagggatatatgtgtgtgaaagctggtagaaatcccaattatggctacacaagctttgataccttcagttgggcttttttgtccttgtttcgactaatgactcaggacttctgggaaaatctttatcaactgacattacgtgctgctgggaaaacgtacatgatattttttgtattggtcattttcttgggctcattctacctaataaatttgatcctggctgtggtggccatggcctacgaggaacagaatcaggccaccttggaagaagcagaacagaaagaggccgaatttcagcagatgattgaacagcttaaaaagcaacaggaggcagctcagcaggcagcaacggcaactgcctcagaacattccagagagcccagtgcagcaggcaggctctcagacagctcatctgaagcctctaagttgagttccaagagtgctaaggaaagaagaaatcggaggaagaaaagaaaacagaaagagcagtctggtggggaagagaaagatgaggatgaattccaaaaatctgaatctgaggacagcatcaggaggaaaggttttcgcttctccattgaagggaaccgattgacatatgaaaagaggtactcctccccacaccagtctttgttgagcatccgtggctccctattttcaccaaggcgaaatagcagaacaagccttttcagctttagagggcgagcaaaggatgtgggatctgagaacgacttcgcagatgatgagcacagcacctttgaggataacgagagccgtagagattccttgtttgtgccccgacgacacggagagagacgcaacagcaacctgagtcagaccagtaggtcatcccggatgctggcagtgtttccagcgaatgggaagatgcacagcactgtggattgcaatggtgtggtttccttggttggtggaccttcagttcctacatcgcctgttggacagcttctgccagaggtgataatagataagccagctactgatgacaatggaacaaccactgaaactgaaatgagaaagagaaggtcaagttctttccacgtttccatggactttctagaagatccttcccaaaggcaacgagcaatgagtatagccagcattctaacaaatacagtagaagaacttgaagaatccaggcagaaatgcccaccctgttggtataaattttccaacatattcttaatctgggactgttctccatattggttaaaagtgaaacatgttgtcaacctggttgtgatggacccatttgttgacctggccatcaccatctgtattgtcttaaatactcttttcatggccatggagcactatccaatgacggaccatttcaataatgtgcttacagtaggaaacttggttttcactgggatctttacagcagaaatgtttctgaaaattattgccatggatccttactattatttccaagaaggctggaatatctttgacggttttattgtgacgcttagcctggtagaacttggactcgccaatgtggaaggattatctgttctccgttcatttggattgctgcgagttttcaagttggcaaaatcttggccaacgttaaatatgctaataaagatcatcggcaattccgtgggggctctgggaaatttaaccctcgtcttggccatcatcgtcttcatttttgccgtggtcggcatgcagctctttggtaaaagctacaaagattgtgtctgcaagatcgccagtgattgtcaactcccacgctggcacatgaatgacttcttccactccttcctgattgtgttccgcgtgctgtgtggggagtggatagagaccatgtgggactgtatggaggttgctggtcaagccatgtgccttactgtcttcatgatggtcatggtgattggaaacctagtggtcctgaatctctttctggccttgcttctgagctcatttagtgcagacaaccttgcagccactgatgatgataatgaaatgaataatctccaaattgctgtggataggatgcacaaaggagtagcttatgtgaaaagaaaaatatatgaatttattcaacagtccttcattaggaaacaaaagattttagatgaaattaaaccacttgatgatctaaacaacaagaaagacagttgtatgtccaatcatacaacagaaattgggaaagatcttgactatcttaaagatgtaaatggaactacaagtggtataggaactggcagcagtgttgaaaaatacattattgatgaaagtgattacatgtcattcataaacaaccccagtcttactgtgactgtaccaattgctgtaggagaatctgactttgaaaatttaaacacggaagactttagtagtgaatcggatctggaagaaagcaaagagaaactgaatgaaagcagtagctcatcagaaggtagcactgtggacatcggcgcacctgtagaagaacagcccgtagtggaacctgaagaaactcttgaaccagaagcttgtttcactgaaggctgtgtacaaagattcaagtgttgtcaaatcaatgtggaagaaggcagaggaaaacaatggtggaacctgagaaggacgtgtttccgaatagttgaacataactggtttgagaccttcattgttttcatgattctccttagtagtggtgctctggcatttgaagatatatatattgatcagcgaaagacgattaagacgatgttggaatatgctgacaaggttttcacttacattttcattctggaaatgcttctaaaatgggtggcatatggctatcaaacatatttcaccaatgcctggtgttggctggacttcttaattgttgatgtttcattggtcagtttaacagcaaatgccttgggttactcagaacttggagccatcaaatctctcaggacactaagagctctgagacctctaagagccttatctcgatttgaagggatgagggtggttgtgaatgcccttttaggagcaattccatccatcatgaatgtgcttctggtttgtcttatattctggctaattttcagcatcatgggcgtaaatttgtttgctggcaaattctaccactgtattaacaccacaactggtgacaggtttgacatcgaagacgtgaataatcatactgattgcctaaaactaatagaaagaaatgagactgctcgatggaaaaatgtgaaagtaaactttgataatgtaggatttgggtatctctctttgcttcaagttgccacattcaaaggatggatggatataatgtatgcagcagttgattccagaaatgtggaactccagcctaagtatgaaaaaagtctgtacatgtatctttactttgttattttcatcatctttgggtccttcttcaccttgaacctgtttattggtgtcatcatagataatttcaaccagcagaaaaagaagtttggaggtcaagacatctttatgacagaagaacagaagaaatactataatgcaatgaaaaaattaggatcgaaaaaaccgcaaaagcctatacctcgaccaggaaacaaatttcaaggaatggtctttgacttcgtaaccagacaagtttttgacataagcatcatgattctcatctgtcttaacatggtcacaatgatggtggaaacagatgaccagagtgaatatgtgactaccattttgtcacgcatcaatctggtgttcattgtgctatttactggagagtgtgtactgaaactcatctctctacgccattattattttaccattggatggaatatttttgattttgtggttgtcattctctccattgtaggtatgtttcttgccgagctgatagaaaagtatttcgtgtcccctaccctgttccgagtgatccgtcttgctaggattggccgaatcctacgtctgatcaaaggagcaaaggggatccgcacgctgctctttgctttgatgatgtcccttcctgcgttgtttaacatcggcctcctactcttcctagtcatgttcatctacgccatctttgggatgtccaactttgcctatgttaagagggaagttgggatcgatgacatgttcaactttgagacctttggcaacagcatgatctgcctattccaaattacaacctctgctggctgggatggattgctagcacccattctcaacagtaagccacccgactgtgaccctaataaagttaaccctggaagctcagttaagggagactgtgggaacccatctgttggaattttcttttttgtcagttacatcatcatatccttcctggttgtggtgaacatgtacatcgcggtcatcctggagaacttcagtgttgctactgaagaaagtgcagagcctctgagtgaggatgactttgagatgttctatgaggtttgggagaagtttgatcccgatgcaactcagttcatggaatttgaaaaattatctcagtttgcagctgcgcttgaaccgcctctcaatctgccacaaccaaacaaactccagctcattgccatggatttgcccatggtgagtggtgaccggatccactgtcttgatatcttatttgcttttacaaagcgggttctaggagagagtggagagatggatgctctacgaatacagatggaagagcgattcatggcttccaatccttccaaggtctcctatcagccaatcactactactttaaaacgaaaacaagaggaagtatctgctgtcattattcagcgtgcttacagacgccaccttttaaagcgaactgtaaaacaagcttcctttacgtacaataaaaacaaaatcaaaggtggggctaatcttcttataaaagaagacatgataattgacagaataaatgaaaactctattacagaaaaaactgatctgaccatgtccactgcagcttgtccaccttcctatgaccgggtgacaaagccaattgtggaaaaacatgagcaagaaggcaaagatgaaaaagccaaagggaaataaatgaaaataaataaaaataattgggtgacaaattgtttacagcctgtgaaggtgatgtatttttatcaacaggactcctttaggaggtcaatgccaaactgactgtttttacacaaatctccttaaggtcagtgcctacaataagacagtgaccccttgtcagcaaactgtgactctgtgtaaaggggagatgaccttgacaggaggttactgttctcactaccagctgacactgctgaagataagatgcacaatggctagtcagactgtagggaccagtttcaaggggtgcaaacctgtgattttggggttgtttaacatgaaacactttagtgtagtaattgtatccactgtttgcatttcaactgccacatttgtcacatttttatggaatctgttagtggattcatctttttgttaatccatgtgtttattatatgtgactatttttgtaaacgaagtttctgttgagaaataggctaaggacctctataacaggtatgccacctggggggtatggcaaccacatggccctcccagctacacaaagtcgtggtttgcatgagggcatgctgcacttagagatcatgcatgagaaaaagtcacaagaaaaacaaattcttaaatttcaccatatttctgggaggggtaattgggtgataagtggaggtgctttgttgatcttgttttgcgaaatccagcccctagaccaagtagattatttgtgggtaggccagtaaatcttagcaggtgcaaacttcattcaaatgtttggagtcataaatgttatgtttctttttgttgtattaaaaaaaaaacctgaatagtgaatattgcccctcaccctccaccgccagaagactgaattgaccaaaattactctttataaatttctgctttttcctgcactttgtttagccatctttgggctctcagcaaggttgacactgtatatgttaatgaaatgctatttattatgtaaatagtcattttaccctgtggtgcacgtttgagcaaacaaataatgacctaagcacagtatttattgcatcaaatatgtaccacaagaaatgtagagtgcaagctttacacaggtaataaaatgtattctgtaccatttatagatagtttggatgctatcaatgcatgtttatattaccatgctgctgtatctggtttctctcactgctcagaatctcatttatgagaaaccatatgtcagtggtaaagtcaaggaaattgttcaacagatctcatttatttaagtcattaagcaatagtttgcagcactttaacagctttttggttatttttacattttaagtggataacatatggtatatagccagactgtacagacatgtttaaaaaaacacactgcttaacctattaaatatgtgtttagaattttataagcaaatataaatactgtaaaaagtcactttattttatttttcagcattatgtacataaatatgaagaggaaattatcttcaggttgatatcacaatcacttttcttactttctgtccatagtactttttcatgaaagaaatttgctaaataagacatgaaaacaagactgggtagttgtagatttctgctttttaaattacatttgctaattttagattatttcacaattttaaggagcaaaataggttcacgattcatatccaaattatgctttgcaattggaaaagggtttaaaattttatttatatttctggtagtacctgtactaactgaattgaaggtagtgcttatgttatttttgttctttttttctgacttcggtttatgttttcatttctttggagtaatgctgctctagattgttctaaatagaatgtgggcttcataatttttttttccacaaaaacagagtagtcaacttatatagtcaattacatcaggacattttgtgtttcttacagaagcaaaccataggctcctcttttccttaaaactacttagataaactgtattcgtgaactgcatgctggaaaatgctactattatgctaaataatgctaaccaacatttaaaatgtgcaaaactaataaagattacattttttatttt

SEQ ID NO: 36 - DNA, 8381 bp, Homo sapiens
atactgcagaggtctctggtgcatgtgtgtatgtgtgcgtttgtgtgtgtttgtgtgtctgtgtgttctgccccagtgagactgcagcccttgtaaatactttgacaccttttgcaagaaggaatctgaacaattgcaactgaaggcacattgttatcatctcgtctttgggtgatgctgttcctcactgcagatggataattttccttttaatcaggaatttcatatgcagaataaatggtaattaaaatgtgcaggatgacaagatggagcaaacagtgcttgtaccaccaggacctgacagcttcaacttcttcaccagagaatctcttgcggctattgaaagacgcattgcagaagaaaaggcaaagaatcccaaaccagacaaaaaagatgacgacgaaaatggcccaaagccaaatagtgacttggaagctggaaagaaccttccatttatttatggagacattcctccagagatggtgtcagagcccctggaggacctggacccctactatatcaataagaaaacttttatagtattgaataaattgaaggccatcttccggttcagtgccacctctgccctgtacattttaactcccttcaatcctcttaggaaaatagctattaagattttggtacattcattattcagcatgctaattatgtgcactattttgacaaactgtgtgtttatgacaatgagtaaccctcctgattggacaaagaatgtagaatacaccttcacaggaatatatacttttgaatcacttataaaaattattgcaaggggattctgtttagaagattttactttccttcgggatccatggaactggctcgatttcactgtcattacatttgcgtacgtcacagagtttgtggacctgggcaatgtctcggcattgagaacattcagagttctccgagcattgaagacgatttcagtcattccaggcctgaaaaccattgtgggagccctgatccagtctgtgaagaagctctcagatgtaatgatcctgactgtgttctgtctgagcgtatttgctctaattgggctgcagctgttcatgggcaacctgaggaataaatgtatacaatggcctcccaccaatgcttccttggaggaacatagtatagaaaagaatataactgtgaattataatggtacacttataaatgaaactgtctttgagtttgactggaagtcatatattcaagattcaagatatcattatttcctggagggttttttagatgcactactatgtggaaatagctctgatgcaggccaatgtccagagggatatatgtgtgtgaaagctggtagaaatcccaattatggctacacaagctttgataccttcagttgggcttttttgtccttgtttcgactaatgactcaggacttctgggaaaatctttatcaactgacattacgtgctgctgggaaaacgtacatgatattttttgtattggtcattttcttgggctcattctacctaataaatttgatcctggctgtggtggccatggcctacgaggaacagaatcaggccaccttggaagaagcagaacagaaagaggccgaatttcagcagatgattgaacagcttaaaaagcaacaggaggcagctcagcaggcagcaacggcaactgcctcagaacattccagagagcccagtgcagcaggcaggctctcagacagctcatctgaagcctctaagttgagttccaagagtgctaaggaaagaagaaatcggaggaagaaaagaaaacagaaagagcagtctggtggggaagagaaagatgaggatgaattccaaaaatctgaatctgaggacagcatcaggaggaaaggttttcgcttctccattgaagggaaccgattgacatatgaaaagaggtactcctccccacaccagtctttgttgagcatccgtggctccctattttcaccaaggcgaaatagcagaacaagccttttcagctttagagggcgagcaaaggatgtgggatctgagaacgacttcgcagatgatgagcacagcacctttgaggataacgagagccgtagagattccttgtttgtgccccgacgacacggagagagacgcaacagcaacctgagtcagaccagtaggtcatcccggatgctggcagtgtttccagcgaatgggaagatgcacagcactgtggattgcaatggtgtggtttccttggttggtggaccttcagttcctacatcgcctgttggacagcttctgccagaggtgataatagataagccagctactgatgacaatggaacaaccactgaaactgaaatgagaaagagaaggtcaagttctttccacgtttccatggactttctagaagatccttcccaaaggcaacgagcaatgagtatagccagcattctaacaaatacagtagaagaacttgaagaatccaggcagaaatgcccaccctgttggtataaattttccaacatattcttaatctgggactgttctccatattggttaaaagtgaaacatgttgtcaacctggttgtgatggacccatttgttgacctggccatcaccatctgtattgtcttaaatactcttttcatggccatggagcactatccaatgacggaccatttcaataatgtgcttacagtaggaaacttggttttcactgggatctttacagcagaaatgtttctgaaaattattgccatggatccttactattatttccaagaaggctggaatatctttgacggttttattgtgacgcttagcctggtagaacttggactcgccaatgtggaaggattatctgttctccgttcatttcgattgctgcgagttttcaagttggcaaaatcttggccaacgttaaatatgctaataaagatcatcggcaattccgtgggggctctgggaaatttaaccctcgtcttggccatcatcgtcttcatttttgccgtggtcggcatgcagctctttggtaaaagctacaaagattgtgtctgcaagatcgccagtgattgtcaactcccacgctggcacatgaatgacttcttccactccttcctgattgtgttccgcgtgctgtgtggggagtggatagagaccatgtgggactgtatggaggttgctggtcaagccatgtgccttactgtcttcgtgatggtcatggtgattggaaacctagtggtcctgaatctctttctggccttgcttctgagctcatttagtgcagacaaccttgcagccactgatgatgataatgaaatgaataatctccaaattgctgtggataggatgcacaaaggagtagcttatgtgaaaagaaaaatatatgaatttattcaacagtccttcattaggaaacaaaagattttagatgaaattaaaccacttgatgatctaaacaacaagaaagacagttgtatgtccaatcatacaacagaaattgggaaagatcttgactatcttaaagatgtaaatggaactacaagtggtataggaactggcagcagtgttgaaaaatacattattgatgaaagtgattacatgtcattcataaacaaccccagtcttactgtgactgtaccaattgctgtaggagaatctgactttgaaaatttaaacacggaagactttagtagtgaatcggatctggaagaaagcaaagagaaactgaatgaaagcagtagctcatcagaaggtagcactgtggacatcggcgcacctgtagaagaacagcccgtagtggaacctgaagaaactcttgaaccagaagcttgtttcactgaaggctgtgtacaaagattcaagtgttgtcaaatcaatgtggaagaaggcagaggaaaacaatggtggaacctgagaaggacgtgtttccgaatagttgaacataactggtttgagaccttcattgttttcatgattctccttagtagtggtgctctggcatttgaagatatatatattgatcagcgaaagacgattaagacgatgttggaatatgctgacaaggttttcacttacattttcattctggaaatgcttctaaaatgggtggcatatggctatcaaacatatttcaccaatgcctggtgttggctggacttcttaattgttgatgtttcattggtcagtttaacagcaaatgccttgggttactcagaacttggagccatcaaatctctcaggacactaagagctctgagacctctaagagccttatctcgatttgaagggatgagggtggttgtgaatgcccttttaggagcaattccatccatcatgaatgtgcttctggtttgtcttatattctggctaattttcagcatcatgggcgtaaatttgtttgctggcaaattctaccactgtattaacaccacaactggtgacaggtttgacatcgaagacgtgaataatcatactgattgcctaaaactaatagaaagaaatgagactgctcgatggaaaaatgtgaaagtaaactttgataatgtaggatttgggtatctctctttgcttcaagttgccacattcaaaggatggatggatataatgtatgcagcagttgattccagaaatgtggaactccagcctaagtatgaaaaaagtctgtacatgtatctttactttgttattttcatcatctttgggtccttcttcaccttgaacctgtttattggtgtcatcatagataatttcaaccagcagaaaaagaagtttggaggtcaagacatctttatgacagaagaacagaagaaatactataatgcaatgaaaaaattaggatcgaaaaaaccgcaaaagcctatacctcgaccaggaaacaaatttcaaggaatggtctttgacttcgtaaccagacaagtttttgacataagcatcatgattctcatctgtcttaacatggtcacaatgatggtggaaacagatgaccagagtgaatatgtgactaccattttgtcacgcatcaatctggtgttcattgtgctatttactggagagtgtgtactgaaactcatctctctacgccattattattttaccattggatggaatatttttgattttgtggttgtcattctctccattgtaggtatgtttcttgccgagctgatagaaaagtatttcgtgtcccctaccctgttccgagtgatccgtcttgctaggattggccgaatcctacgtctgatcaaaggagcaaaggggatccgcacgctgctctttgctttgatgatgtcccttcctgcgttgtttaacatcggcctcctactcttcctagtcatgttcatctacgccatctttgggatgtccaactttgcctatgttaagagggaagttgggatcgatgacatgttcaactttgagacctttggcaacagcatgatctgcctattccaaattacaacctctgctggctgggatggattgctagcacccattctcaacagtaagccacccgactgtgaccctaataaagttaaccctggaagctcagttaagggagactgtgggaacccatctgttggaattttcttttttgtcagttacatcatcatatccttcctggttgtggtgaacatgtacatcgcggtcatcctggagaacttcagtgttgctactgaagaaagtgcagagcctctgagtgaggatgactttgagatgttctatgaggtttgggagaagtttgatcccgatgcaactcagttcatggaatttgaaaaattatctcagtttgcagctgcgcttgaaccgcctctcaatctgccacaaccaaacaaactccagctcattgccatggatttgcccatggtgagtggtgaccggatccactgtcttgatatcttatttgcttttacaaagcgggttctaggagagagtggagagatggatgctctacgaatacagatggaagagcgattcatggcttccaatccttccaaggtctcctatcagccaatcactactactttaaaacgaaaacaagaggaagtatctgctgtcattattcagcgtgcttacagacgccaccttttaaagcgaactgtaaaacaagcttcctttacgtacaataaaaacaaaatcaaaggtggggctaatcttcttataaaagaagacatgataattgacagaataaatgaaaactctattacagaaaaaactgatctgaccatgtccactgcagcttgtccaccttcctatgaccgggtgacaaagccaattgtggaaaaacatgagcaagaaggcaaagatgaaaaagccaaagggaaataaatgaaaataaataaaaataattgggtgacaaattgtttacagcctgtgaaggtgatgtatttttatcaacaggactcctttaggaggtcaatgccaaactgactgtttttacacaaatctccttaaggtcagtgcctacaataagacagtgaccccttgtcagcaaactgtgactctgtgtaaaggggagatgaccttgacaggaggttactgttctcactaccagctgacactgctgaagataagatgcacaatggctagtcagactgtagggaccagtttcaaggggtgcaaacctgtgattttggggttgtttaacatgaaacactttagtgtagtaattgtatccactgtttgcatttcaactgccacatttgtcacatttttatggaatctgttagtggattcatctttttgttaatccatgtgtttattatatgtgactatttttgtaaacgaagtttctgttgagaaataggctaaggacctctataacaggtatgccacctggggggtatggcaaccacatggccctcccagctacacaaagtcgtggtttgcatgagggcatgctgcacttagagatcatgcatgagaaaaagtcacaagaaaaacaaattcttaaatttcaccatatttctgggaggggtaattgggtgataagtggaggtgctttgttgatcttgttttgcgaaatccagcccctagaccaagtagattatttgtgggtaggccagtaaatcttagcaggtgcaaacttcattcaaatgtttggagtcataaatgttatgtttctttttgttgtattaaaaaaaaaacctgaatagtgaatattgcccctcaccctccaccgccagaagactgaattgaccaaaattactctttataaatttctgctttttcctgcactttgtttagccatctttgggctctcagcaaggttgacactgtatatgttaatgaaatgctatttattatgtaaatagtcattttaccctgtggtgcacgtttgagcaaacaaataatgacctaagcacagtatttattgcatcaaatatgtaccacaagaaatgtagagtgcaagctttacacaggtaataaaatgtattctgtaccatttatagatagtttggatgctatcaatgcatgtttatattaccatgctgctgtatctggtttctctcactgctcagaatctcatttatgagaaaccatatgtcagtggtaaagtcaaggaaattgttcaacagatctcatttatttaagtcattaagcaatagtttgcagcactttaacagctttttggttatttttacattttaagtggataacatatggtatatagccagactgtacagacatgtttaaaaaaacacactgcttaacctattaaatatgtgtttagaattttataagcaaatataaatactgtaaaaagtcactttattttatttttcagcattatgtacataaatatgaagaggaaattatcttcaggttgatatcacaatcacttttcttactttctgtccatagtactttttcatgaaagaaatttgctaaataagacatgaaaacaagactgggtagttgtagatttctgctttttaaattacatttgctaattttagattatttcacaattttaaggagcaaaataggttcacgattcatatccaaattatgctttgcaattggaaaagggtttaaaattttatttatatttctggtagtacctgtactaactgaattgaaggtagtgcttatgttatttttgttctttttttctgacttcggtttatgttttcatttctttggagtaatgctgctctagattgttctaaatagaatgtgggcttcataatttttttttccacaaaaacagagtagtcaacttatatagtcaattacatcaggacattttgtgtttcttacagaagcaaaccataggctcctcttttccttaaaactacttagataaactgtattcgtgaactgcatgctggaaaatgctactattatgctaaataatgctaaccaacatttaaaatgtgcaaaactaataaagattacattttttatttt

SEQ ID NO: 37 - DNA, 8381 bp, Homo sapiens
atactgcagaggtctctggtgcatgtgtgtatgtgtgcgtttgtgtgtgtttgtgtgtctgtgtgttctgccccagtgagactgcagcccttgtaaatactttgacaccttttgcaagaaggaatctgaacaattgcaactgaaggcacattgttatcatctcgtctttgggtgatgctgttcctcactgcagatggataattttccttttaatcaggaatttcatatgcagaataaatggtaattaaaatgtgcaggatgacaagatggagcaaacagtgcttgtaccaccaggacctgacagcttcaacttcttcaccagagaatctcttgcggctattgaaagacgcattgcagaagaaaaggcaaagaatcccaaaccagacaaaaaagatgacgacgaaaatggcccaaagccaaatagtgacttggaagctggaaagaaccttccatttatttatggagacattcctccagagatggtgtcagagcccctggaggacctggacccctactatatcaataagaaaacttttatagtattgaataaattgaaggccatcttccggttcagtgccacctctgccctgtacattttaactcccttcaatcctcttaggaaaatagctattaagattttggtacattcattattcagcatgctaattatgtgcactattttgacaaactgtgtgtttatgacaatgagtaaccctcctgattggacaaagaatgtagaatacaccttcacaggaatatatacttttgaatcacttataaaaattattgcaaggggattctgtttagaagattttactttccttcgggatccatggaactggctcgatttcactgtcattacatttgcgtacgtcacagagtttgtggacctgggcaatgtctcggcattgagaacattcagagttctccgagcattgaagacgatttcagtcattccaggcctgaaaaccattgtgggagccctgatccagtctgtgaagaagctctcagatgtaatgatcctgactgtgttctgtctgagcgtatttgctctaattgggctgcagctgttcatgggcaacctgaggaataaatgtatacaatggcctcccaccaatgcttccttggaggaacatagtatagaaaagaatataactgtgaattataatggtacacttataaatgaaactgtctttgagtttgactggaagtcatatattcaagattcaagatatcattatttcctggagggttttttagatgcactactatgtggaaatagctctgatgcaggccaatgtccagagggatatatgtgtgtgaaagctggtagaaatcccaattatggctacacaagctttgataccttcagttgggcttttttgtccttgtttcgactaatgactcaggacttctgggaaaatctttatcaactgacattacgtgctgctgggaaaacgtacatgatattttttgtattggtcattttcttgggctcattctacctaataaatttgatcctggctgtggtggccatggcctacgaggaacagaatcaggccaccttggaagaagcagaacagaaagaggccgaatttcagcagatgattgaacagcttaaaaagcaacaggaggcagctcagcaggcagcaacggcaactgcctcagaacattccagagagcccagtgcagcaggcaggctctcagacagctcatctgaagcctctaagttgagttccaagagtgctaaggaaagaagaaatcggaggaagaaaagaaaacagaaagagcagtctggtggggaagagaaagatgaggatgaattccaaaaatctgaatctgaggacagcatcaggaggaaaggttttcgcttctccattgaagggaaccgattgacatatgaaaagaggtactcctccccacaccagtctttgttgagcatccgtggctccctattttcaccaaggcgaaatagcagaacaagccttttcagctttagagggcgagcaaaggatgtgggatctgagaacgacttcgcagatgatgagcacagcacctttgaggataacgagagccgtagagattccttgtttgtgccccgacgacacggagagagacgcaacagcaacctgagtcagaccagtaggtcatcccggatgctggcagtgtttccagcgaatgggaagatgcacagcactgtggattgcaatggtgtggtttccttggttggtggaccttcagttcctacatcgcctgttggacagcttctgccagaggtgataatagataagccagctactgatgacaatggaacaaccactgaaactgaaatgagaaagagaaggtcaagttctttccacgtttccatggactttctagaagatccttcccaaaggcaacgagcaatgagtatagccagcattctaacaaatacagtagaagaacttgaagaatccaggcagaaatgcccaccctgttggtataaattttccaacatattcttaatctgggactgttctccatattggttaaaagtgaaacatgttgtcaacctggttgtgatggacccatttgttgacctggccatcaccatctgtattgtcttaaatactcttttcatggccatggagcactatccaatgacggaccatttcaataatgtgcttacagtaggaaacttggttttcactgggatctttacagcagaaatgtttctgaaaattattgccatggatccttactattatttccaagaaggctggaatatctttgacggttttattgtgacgcttagcctggtagaacttggactcgccaatgtggaaggattatctgttctccgttcatttcgattgctgcgagttttcaagttggcaaaatcttggccaacgttaaatatgctaataaagatcatcggcaattccgtgggggctctgggaaatttaaccctcgtcttggccatcatcgtcttcatttttgccgtggtcggcatgcagctctttggtaaaagctacaaagattgtgtctgcaagatcgccagtgattgtcaactcccacgctggcacatgaatgacttcttccactccttcctgattgtgttccgcgtgctgtgtggggagtggatagagaccatgtgggactgtatggaggttgctggtcaagccatgtgccttactgtcttcatgatggtcatggtgattggaaacctagtggtcctgaatctctttctggccttgcttctgagctcatttagtgcagacaaccttgcagccactgatgatgataatgaaatgaataatctccaaattgctgtggataggatgcacaaaggagtagcttatgtgaaaagaaaaatatatgaatttattcaacagtccttcattaggaaacaaaagattttagatgaaattaaaccacttgatgatctaaacaacaagaaagacagttgtatgtccaatcatacaacagaaattgggaaagatcttgactatcttaaagatgtaaatggaactacaagtggtataggaactggcagcagtgttgaaaaatacattattgatgaaagtgattacatgtcattcataaacaaccccagtcttactgtgactgtaccaattgctgtaggagaatctgactttgaaaatttaaacacggaagactttagtagtgaatcggatctggaagaaagcaaagagaaactgaatgaaagcagtagctcatcagaaggtagcactgtggacatcggcacacctgtagaagaacagcccgtagtggaacctgaagaaactcttgaaccagaagcttgtttcactgaaggctgtgtacaaagattcaagtgttgtcaaatcaatgtggaagaaggcagaggaaaacaatggtggaacctgagaaggacgtgtttccgaatagttgaacataactggtttgagaccttcattgttttcatgattctccttagtagtggtgctctggcatttgaagatatatatattgatcagcgaaagacgattaagacgatgttggaatatgctgacaaggttttcacttacattttcattctggaaatgcttctaaaatgggtggcatatggctatcaaacatatttcaccaatgcctggtgttggctggacttcttaattgttgatgtttcattggtcagtttaacagcaaatgccttgggttactcagaacttggagccatcaaatctctcaggacactaagagctctgagacctctaagagccttatctcgatttgaagggatgagggtggttgtgaatgcccttttaggagcaattccatccatcatgaatgtgcttctggtttgtcttatattctggctaattttcagcatcatgggcgtaaatttgtttgctggcaaattctaccactgtattaacaccacaactggtgacaggtttgacatcgaagacgtgaataatcatactgattgcctaaaactaatagaaagaaatgagactgctcgatggaaaaatgtgaaagtaaactttgataatgtaggatttgggtatctctctttgcttcaagttgccacattcaaaggatggatggatataatgtatgcagcagttgattccagaaatgtggaactccagcctaagtatgaaaaaagtctgtacatgtatctttactttgttattttcatcatctttgggtccttcttcaccttgaacctgtttattggtgtcatcatagataatttcaaccagcagaaaaagaagtttggaggtcaagacatctttatgacagaagaacagaagaaatactataatgcaatgaaaaaattaggatcgaaaaaaccgcaaaagcctatacctcgaccaggaaacaaatttcaaggaatggtctttgacttcgtaaccagacaagtttttgacataagcatcatgattctcatctgtcttaacatggtcacaatgatggtggaaacagatgaccagagtgaatatgtgactaccattttgtcacgcatcaatctggtgttcattgtgctatttactggagagtgtgtactgaaactcatctctctacgccattattattttaccattggatggaatatttttgattttgtggttgtcattctctccattgtaggtatgtttcttgccgagctgatagaaaagtatttcgtgtcccctaccctgttccgagtgatccgtcttgctaggattggccgaatcctacgtctgatcaaaggagcaaaggggatccgcacgctgctctttgctttgatgatgtcccttcctgcgttgtttaacatcggcctcctactcttcctagtcatgttcatctacgccatctttgggatgtccaactttgcctatgttaagagggaagttgggatcgatgacatgttcaactttgagacctttggcaacagcatgatctgcctattccaaattacaacctctgctggctgggatggattgctagcacccattctcaacagtaagccacccgactgtgaccctaataaagttaaccctggaagctcagttaagggagactgtgggaacccatctgttggaattttcttttttgtcagttacatcatcatatccttcctggttgtggtgaacatgtacatcgcggtcatcctggagaacttcagtgttgctactgaagaaagtgcagagcctctgagtgaggatgactttgagatgttctatgaggtttgggagaagtttgatcccgatgcaactcagttcatggaatttgaaaaattatctcagtttgcagctgcgcttgaaccgcctctcaatctgccacaaccaaacaaactccagctcattgccatggatttgcccatggtgagtggtgaccggatccactgtcttgatatcttatttgcttttacaaagcgggttctaggagagagtggagagatggatgctctacgaatacagatggaagagcgattcatggcttccaatccttccaaggtctcctatcagccaatcactactactttaaaacgaaaacaagaggaagtatctgctgtcattattcagcgtgcttacagacgccaccttttaaagcgaactgtaaaacaagcttcctttacgtacaataaaaacaaaatcaaaggtggggctaatcttcttataaaagaagacatgataattgacagaataaatgaaaactctattacagaaaaaactgatctgaccatgtccactgcagcttgtccaccttcctatgaccgggtgacaaagccaattgtggaaaaacatgagcaagaaggcaaagatgaaaaagccaaagggaaataaatgaaaataaataaaaataattgggtgacaaattgtttacagcctgtgaaggtgatgtatttttatcaacaggactcctttaggaggtcaatgccaaactgactgtttttacacaaatctccttaaggtcagtgcctacaataagacagtgaccccttgtcagcaaactgtgactctgtgtaaaggggagatgaccttgacaggaggttactgttctcactaccagctgacactgctgaagataagatgcacaatggctagtcagactgtagggaccagtttcaaggggtgcaaacctgtgattttggggttgtttaacatgaaacactttagtgtagtaattgtatccactgtttgcatttcaactgccacatttgtcacatttttatggaatctgttagtggattcatctttttgttaatccatgtgtttattatatgtgactatttttgtaaacgaagtttctgttgagaaataggctaaggacctctataacaggtatgccacctggggggtatggcaaccacatggccctcccagctacacaaagtcgtggtttgcatgagggcatgctgcacttagagatcatgcatgagaaaaagtcacaagaaaaacaaattcttaaatttcaccatatttctgggaggggtaattgggtgataagtggaggtgctttgttgatcttgttttgcgaaatccagcccctagaccaagtagattatttgtgggtaggccagtaaatcttagcaggtgcaaacttcattcaaatgtttggagtcataaatgttatgtttctttttgttgtattaaaaaaaaaacctgaatagtgaatattgcccctcaccctccaccgccagaagactgaattgaccaaaattactctttataaatttctgctttttcctgcactttgtttagccatctttgggctctcagcaaggttgacactgtatatgttaatgaaatgctatttattatgtaaatagtcattttaccctgtggtgcacgtttgagcaaacaaataatgacctaagcacagtatttattgcatcaaatatgtaccacaagaaatgtagagtgcaagctttacacaggtaataaaatgtattctgtaccatttatagatagtttggatgctatcaatgcatgtttatattaccatgctgctgtatctggtttctctcactgctcagaatctcatttatgagaaaccatatgtcagtggtaaagtcaaggaaattgttcaacagatctcatttatttaagtcattaagcaatagtttgcagcactttaacagctttttggttatttttacattttaagtggataacatatggtatatagccagactgtacagacatgtttaaaaaaacacactgcttaacctattaaatatgtgtttagaattttataagcaaatataaatactgtaaaaagtcactttattttatttttcagcattatgtacataaatatgaagaggaaattatcttcaggttgatatcacaatcacttttcttactttctgtccatagtactttttcatgaaagaaatttgctaaataagacatgaaaacaagactgggtagttgtagatttctgctttttaaattacatttgctaattttagattatttcacaattttaaggagcaaaataggttcacgattcatatccaaattatgctttgcaattggaaaagggtttaaaattttatttatatttctggtagtacctgtactaactgaattgaaggtagtgcttatgttatttttgttctttttttctgacttcggtttatgttttcatttctttggagtaatgctgctctagattgttctaaatagaatgtgggcttcataatttttttttccacaaaaacagagtagtcaacttatatagtcaattacatcaggacattttgtgtttcttacagaagcaaaccataggctcctcttttccttaaaactacttagataaactgtattcgtgaactgcatgctggaaaatgctactattatgctaaataatgctaaccaacatttaaaatgtgcaaaactaataaagattacattttttatttt

SEQ ID NO: 38 - DNA, 8381 bp, Homo sapiens
atactgcagaggtctctggtgcatgtgtgtatgtgtgcgtttgtgtgtgtttgtgtgtctgtgtgttctgccccagtgagactgcagcccttgtaaatactttgacaccttttgcaagaaggaatctgaacaattgcaactgaaggcacattgttatcatctcgtctttgggtgatgctgttcctcactgcagatggataattttccttttaatcaggaatttcatatgcagaataaatggtaattaaaatgtgcaggatgacaagatggagcaaacagtgcttgtaccaccaggacctgacagcttcaacttcttcaccagagaatctcttgcggctattgaaagacgcattgcagaagaaaaggcaaagaatcccaaaccagacaaaaaagatgacgacgaaaatggcccaaagccaaatagtgacttggaagctggaaagaaccttccatttatttatggagacattcctccagagatggtgtcagagcccctggaggacctggacccctactatatcaataagaaaacttttatagtattgaataaattgaaggccatcttccggttcagtgccacctctgccctgtacattttaactcccttcaatcctcttaggaaaatagctattaagattttggtacattcattattcagcatgctaattatgtgcactattttgacaaactgtgtgtttatgacaatgagtaaccctcctgattggacaaagaatgtagaatacaccttcacaggaatatatacttttgaatcacttataaaaattattgcaaggggattctgtttagaagattttactttccttcgggatccatggaactggctcgatttcactgtcattacatttgcgtacgtcacagagtttgtggacctgggcaatgtctcggcattgagaacattcagagttctccgagcattgaagacgatttcagtcattccaggcctgaaaaccattgtgggagccctgatccagtctgtgaagaagctctcagatgtaatgatcctgactgtgttctgtctgagcgtatttgctctaattgggctgcagctgttcatgggcaacctgaggaataaatgtatacaatggcctcccaccaatgcttccttggaggaacatagtatagaaaagaatataactgtgaattataatggtacacttataaatgaaactgtctttgagtttgactggaagtcatatattcaagattcaagatatcattatttcctggagggttttttagatgcactactatgtggaaatagctctgatgcaggccaatgtccagagggatatatgtgtgtgaaagctggtagaaatcccaattatggctacacaagctttgataccttcagttgggcttttttgtccttgtttcgactaatgactcaggacttctgggaaaatctttatcaactgacattacgtgctgctgggaaaacgtacatgatattttttgtattggtcattttcttgggctcattctacctaataaatttgatcctggctgtggtggccatggcctacgaggaacagaatcaggccaccttggaagaagcagaacagaaagaggccgaatttcagcagatgattgaacagcttaaaaagcaacaggaggcagctcagcaggcagcaacggcaactgcctcagaacattccagagagcccagtgcagcaggcaggctctcagacagctcatctgaagcctctaagttgagttccaagagtgctaaggaaagaagaaatcggaggaagaaaagaaaacagaaagagcagtctggtggggaagagaaagatgaggatgaattccaaaaatctgaatctgaggacagcatcaggaggaaaggttttcgcttctccattgaagggaaccgattgacatatgaaaagaggtactcctccccacaccagtctttgttgagcatccgtggctccctattttcaccaaggcgaaatagcagaacaagccttttcagctttagagggcgagcaaaggatgtgggatctgagaacgacttcgcagatgatgagcacagcacctttgaggataacgagagccgtagagattccttgtttgtgccccgacgacacggagagagacgcaacagcaacctgagtcagaccagtaggtcatcccggatgctggcagtgtttccagcgaatgggaagatgcacagcactgtggattgcaatggtgtggtttccttggttggtggaccttcagttcctacatcgcctgttggacagcttctgccagaggtgataatagataagccagctactgatgacaatggaacaaccactgaaactgaaatgagaaagagaaggtcaagttctttccacgtttccatggactttctagaagatccttcccaaaggcaacgagcaatgagtatagccagcattctaacaaatacagtagaagaacttgaagaatccaggcagaaatgcccaccctgttggtataaattttccaacatattcttaatctgggactgttctccatattggttaaaagtgaaacatgttgtcaacctggttgtgatggacccatttgttgacctggccatcaccatctgtattgtcttaaatactcttttcatggccatggagcactatccaatgacggaccatttcaataatgtgcttacagtaggaaacttggttttcactgggatctttacagcagaaatgtttctgaaaattattgccatggatccttactattatttccaagaaggctggaatatctttgacggttttattgtgacgcttagcctggtagaacttggactcgccaatgtggaaggattatctgttctccgttcatttcgattgctgcgagttttcaagttggcaaaatcttggccaacgttaaatatgctaataaagatcatcggcaattccgtgggggctctgggaaatttaaccctcgtcttggccatcatcgtcttcatttttgccgtggtcggcatgcagctctttggtaaaagctacaaagattgtgtctgcaagatcgccagtgattgtcaactcccacgctggcacatgaatgacttcttccactccttcctgattgtgttccgcgtgctgtgtggggagtggatagagaccatgtgggactgtatggaggttgctggtcaagccatgtgccttactgtcttcatgatggtcatggtgattggaaacctagtggtcctgaatctctttctggccttgcttctgagctcatttagtgcagacaaccttgcagccactgatgatgataatgaaatgaataatctccaaattgctgtggataggatgcacaaaggagtagcttatgtgaaaagaaaaatatatgaatttattcaacagtccttcattaggaaacaaaagattttagatgaaattaaaccacttgatgatctaaacaacaagaaagacagttgtatgtccaatcatacaacagaaattgggaaagatcttgactatcttaaagatgtaaatggaactacaagtggtataggaactggcagcagtgttgaaaaatacattattgatgaaagtgattacatgtcattcataaacaaccccagtcttactgtgactgtaccaattgctgtaggagaatctgactttgaaaatttaaacacggaagactttagtagtgaatcggatctggaagaaagcaaagagaaactgaatgaaagcagtagctcatcagaaggtagcactgtggacatcggcgcacctgtagaagaacagcccgtagtggaacctgaagaaactcttgaaccagaagcttgtttcactgaaggctgtgtacaaagattcaagtgttgtcaaatcaatgtggaagaaggcagaggaaaacaatggtggaacctgagaaggacgtgtttccgaatagttgaacataactggtttgagaccttcattgttttcatgattctccttagtagtggtgctctggcatttgaagatatatatattgatcagcgaaagacgattaagacgatgttggaatatgctgacaaggttttcacttacattttcattctggaaatgcttctaaaatgggtggcatatggctatcaaacatatttcaccaatgcctggtgttggctggacttcttaattgttgatgtttcattggtcagtttaacagcaaatgccttgggttactcagaacttggagccatcaaatctctcaggacactaagagctctgagacctctaagagccttatctcgatttgaagggatgagggtggttgtgaatgcccttttaggagcaattccatccatcatgaatgtgcttctggtttgtcttatattctggctaattttcagcatcatgggcgtaaatttgtttgctggcaaattctaccactgtattaacaccacaactggtgacaggtttgacatcgaagacgtgaataatcatactgattgcctaaaactaatagaaagaaatgagactgctcgatggaaaaatgtgaaagtaaactttgataatgtaggatttgggtatctctctttgcttcaagttgccacattcaaaggatggatggatataatgtatgcagcagttgattccagaaatgtggaactccagcctaagtatgaaaaaagtctgtacatgtatctttactttgttattttcatcatctttgggtccttcttcaccttgaacctgtttattggtgtcatcatagataatttcaaccagcagaaaaagaagtttggaggtcaagacatctttatgacagaagaacagaagaaatactataatgcaatgaaaaaattaggatcgaaaaaaccgcaaaagcctatacctcgaccaggaaacaaatttcaaggaatggtctttgacttcgtaaccagacaagtttttgacataagcatcatgattctcatctgtcttaacatggtcacaatgatggtggaaacagatgaccagagtgaatatgtgactaccattttgtcacgcattaatctggtgttcattgtgctatttactggagagtgtgtactgaaactcatctctctacgccattattattttaccattggatggaatatttttgattttgtggttgtcattctctccattgtaggtatgtttcttgccgagctgatagaaaagtatttcgtgtcccctaccctgttccgagtgatccgtcttgctaggattggccgaatcctacgtctgatcaaaggagcaaaggggatccgcacgctgctctttgctttgatgatgtcccttcctgcgttgtttaacatcggcctcctactcttcctagtcatgttcatctacgccatctttgggatgtccaactttgcctatgttaagagggaagttgggatcgatgacatgttcaactttgagacctttggcaacagcatgatctgcctattccaaattacaacctctgctggctgggatggattgctagcacccattctcaacagtaagccacccgactgtgaccctaataaagttaaccctggaagctcagttaagggagactgtgggaacccatctgttggaattttcttttttgtcagttacatcatcatatccttcctggttgtggtgaacatgtacatcgcggtcatcctggagaacttcagtgttgctactgaagaaagtgcagagcctctgagtgaggatgactttgagatgttctatgaggtttgggagaagtttgatcccgatgcaactcagttcatggaatttgaaaaattatctcagtttgcagctgcgcttgaaccgcctctcaatctgccacaaccaaacaaactccagctcattgccatggatttgcccatggtgagtggtgaccggatccactgtcttgatatcttatttgcttttacaaagcgggttctaggagagagtggagagatggatgctctacgaatacagatggaagagcgattcatggcttccaatccttccaaggtctcctatcagccaatcactactactttaaaacgaaaacaagaggaagtatctgctgtcattattcagcgtgcttacagacgccaccttttaaagcgaactgtaaaacaagcttcctttacgtacaataaaaacaaaatcaaaggtggggctaatcttcttataaaagaagacatgataattgacagaataaatgaaaactctattacagaaaaaactgatctgaccatgtccactgcagcttgtccaccttcctatgaccgggtgacaaagccaattgtggaaaaacatgagcaagaaggcaaagatgaaaaagccaaagggaaataaatgaaaataaataaaaataattgggtgacaaattgtttacagcctgtgaaggtgatgtatttttatcaacaggactcctttaggaggtcaatgccaaactgactgtttttacacaaatctccttaaggtcagtgcctacaataagacagtgaccccttgtcagcaaactgtgactctgtgtaaaggggagatgaccttgacaggaggttactgttctcactaccagctgacactgctgaagataagatgcacaatggctagtcagactgtagggaccagtttcaaggggtgcaaacctgtgattttggggttgtttaacatgaaacactttagtgtagtaattgtatccactgtttgcatttcaactgccacatttgtcacatttttatggaatctgttagtggattcatctttttgttaatccatgtgtttattatatgtgactatttttgtaaacgaagtttctgttgagaaataggctaaggacctctataacaggtatgccacctggggggtatggcaaccacatggccctcccagctacacaaagtcgtggtttgcatgagggcatgctgcacttagagatcatgcatgagaaaaagtcacaagaaaaacaaattcttaaatttcaccatatttctgggaggggtaattgggtgataagtggaggtgctttgttgatcttgttttgcgaaatccagcccctagaccaagtagattatttgtgggtaggccagtaaatcttagcaggtgcaaacttcattcaaatgtttggagtcataaatgttatgtttctttttgttgtattaaaaaaaaaacctgaatagtgaatattgcccctcaccctccaccgccagaagactgaattgaccaaaattactctttataaatttctgctttttcctgcactttgtttagccatctttgggctctcagcaaggttgacactgtatatgttaatgaaatgctatttattatgtaaatagtcattttaccctgtggtgcacgtttgagcaaacaaataatgacctaagcacagtatttattgcatcaaatatgtaccacaagaaatgtagagtgcaagctttacacaggtaataaaatgtattctgtaccatttatagatagtttggatgctatcaatgcatgtttatattaccatgctgctgtatctggtttctctcactgctcagaatctcatttatgagaaaccatatgtcagtggtaaagtcaaggaaattgttcaacagatctcatttatttaagtcattaagcaatagtttgcagcactttaacagctttttggttatttttacattttaagtggataacatatggtatatagccagactgtacagacatgtttaaaaaaacacactgcttaacctattaaatatgtgtttagaattttataagcaaatataaatactgtaaaaagtcactttattttatttttcagcattatgtacataaatatgaagaggaaattatcttcaggttgatatcacaatcacttttcttactttctgtccatagtactttttcatgaaagaaatttgctaaataagacatgaaaacaagactgggtagttgtagatttctgctttttaaattacatttgctaattttagattatttcacaattttaaggagcaaaataggttcacgattcatatccaaattatgctttgcaattggaaaagggtttaaaattttatttatatttctggtagtacctgtactaactgaattgaaggtagtgcttatgttatttttgttctttttttctgacttcggtttatgttttcatttctttggagtaatgctgctctagattgttctaaatagaatgtgggcttcataatttttttttccacaaaaacagagtagtcaacttatatagtcaattacatcaggacattttgtgtttcttacagaagcaaaccataggctcctcttttccttaaaactacttagataaactgtattcgtgaactgcatgctggaaaatgctactattatgctaaataatgctaaccaacatttaaaatgtgcaaaactaataaagattacattttttatttt

SEQ ID NO: 39 - DNA, 8381 bp, Homo sapiens
atactgcagaggtctctggtgcatgtgtgtatgtgtgcgtttgtgtgtgtttgtgtgtctgtgtgttctgccccagtgagactgcagcccttgtaaatactttgacaccttttgcaagaaggaatctgaacaattgcaactgaaggcacattgttatcatctcgtctttgggtgatgctgttcctcactgcagatggataattttccttttaatcaggaatttcatatgcagaataaatggtaattaaaatgtgcaggatgacaagatggagcaaacagtgcttgtaccaccaggacctgacagcttcaacttcttcaccagagaatctcttgcggctattgaaagacgcattgcagaagaaaaggcaaagaatcccaaaccagacaaaaaagatgacgacgaaaatggcccaaagccaaatagtgacttggaagctggaaagaaccttccatttatttatggagacattcctccagagatggtgtcagagcccctggaggacctggacccctactatatcaataagaaaacttttatagtattgaataaattgaaggccatcttccggttcagtgccacctctgccctgtacattttaactcccttcaatcctcttaggaaaatagctattaagattttggtacattcattattcagcatgctaattatgtgcactattttgacaaactgtgtgtttatgacaatgagtaaccctcctgattggacaaagaatgtagaatacaccttcacaggaatatatacttttgaatcacttataaaaattattgcaaggggattctgtttagaagattttactttccttcgggatccatggaactggctcgatttcactgtcattacatttgcgtacgtcacagagtttgtggacctgggcaatgtctcggcattgagaacattcagagttctccgagcattgaagacgatttcagtcattccaggcctgaaaaccattgtgggagccctgatccagtctgtgaagaagctctcagatgtaatgatcctgactgtgttctgtctgagcgtatttgctctaattgggctgcagctgttcatgggcaacctgaggaataaatgtatacaatggcctcccaccaatgcttccttggaggaacatagtatagaaaagaatataactgtgaattataatggtacacttataaatgaaactgtctttgagtttgactggaagtcatatattcaagattcaagatatcattatttcctggagggttttttagatgcactactatgtggaaatagctctgatgcaggccaatgtccagagggatatatgtgtgtgaaagctggtagaaatcccaattatggctacacaagctttgataccttcagttgggcttttttgtccttgtttcgactaatgactcaggacttctgggaaaatctttatcaactgacattacgtgctgctgggaaaacgtacatgatattttttgtattggtcattttcttgggctcattctacctaataaatttgatcctggctgtggtggccatggcctacgaggaacagaatcaggccaccttggaagaagcagaacagaaagaggccgaatttcagcagatgattgaacagcttaaaaagcaacaggaggcagctcagcaggcagcaacggcaactgcctcagaacattccagagagcccagtgcagcaggcaggctctcagacagctcatctgaagcctctaagttgagttccaagagtgctaaggaaagaagaaatcggaggaagaaaagaaaacagaaagagcagtctggtggggaagagaaagatgaggatgaattccaaaaatctgaatctgaggacagcatcaggaggaaaggttttcgcttctccattgaagggaaccgattgacatatgaaaagaggtactcctccccacaccagtctttgttgagcatccgtggctccctattttcaccaaggcgaaatagcagaacaagccttttcagctttagagggcgagcaaaggatgtgggatctgagaacgacttcgcagatgatgagcacagcacctttgaggataacgagagccgtagagattccttgtttgtgccccgacgacacggagagagacgcaacagcaacctgagtcagaccagtaggtcatcccggatgctggcagtgtttccagcgaatgggaagatgcacagcactgtggattgcaatggtgtggtttccttggttggtggaccttcagttcctacatcgcctgttggacagcttctgccagaggtgataatagataagccagctactgatgacaatggaacaaccactgaaactgaaatgagaaagagaaggtcaagttctttccacgtttccatggactttctagaagatccttcccaaaggcaacgagcaatgagtatagccagcattctaacaaatacagtagaagaacttgaagaatccaggcagaaatgcccaccctgttggtataaattttccaacatattcttaatctgggactgttctccatattggttaaaagtgaaacatgttgtcaacctggttgtgatggacccatttgttgacctggccatcaccatctgtattgtcttaaatactcttttcatggccatggagcactatccaatgacggaccatttcaataatgtgcttacagtaggaaacttggttttcactgggatctttacagcagaaatgtttctgaaaattattgccatggatccttactattatttccaagaaggctggaatatctttgacggttttattgtgacgcttagcctggtagaacttggactcgccaatgtggaaggattatctgttctccgttcatttcgattgctgcgagttttcaagttggcaaaatcttggccaacgttaaatatgctaataaagatcatcggcaattccgtgggggctctgggaaatttaaccctcgtcttggccatcatcgtcttcatttttgccgtggtcggcatgcagctctttggtaaaagctacaaagattgtgtctgcaagatcgccagtgattgtcaactcccacgctggcacatgaatgacttcttccactccttcctgattgtgttccgcgtgctgtgtggggagtggatagagaccatgtgggactgtatggaggttgctggtcaagccatgtgccttactgtcttcatgatggtcatggtgattggaaacctagtggtcctgaatctctttctggccttgcttctgagctcatttagtgcagacaaccttgcagccactgatgatgataatgaaatgaataatctccaaattgctgtggataggatgcacaaaggagtagcttatgtgaaaagaaaaatatatgaatttattcaacagtccttcattaggaaacaaaagattttagatgaaattaaaccacttgatgatctaaacaacaagaaagacagttgtatgtccaatcatacaacagaaattgggaaagatcttgactatcttaaagatgtaaatggaactacaagtggtataggaactggcagcagtgttgaaaaatacattattgatgaaagtgattacatgtcattcataaacaaccccagtcttactgtgactgtaccaattgctgtaggagaatctgactttgaaaatttaaacacggaagactttagtagtgaatcggatctggaagaaagcaaagagaaactgaatgaaagcagtagctcatcagaaggtagcactgtggacatcggcgcacctgtagaagaacagcccgtagtggaacctgaagaaactcttgaaccagaagcttgtttcactgaaggctgtgtacaaagattcaagtgttgtcaaatcaatgtggaagaaggcagaggaaaacaatggtggaacctgagaaggacgtgtttccgaatagttgaacataactggtttgagaccttcattgttttcatgattctccttagtagtggtgctctggcatttgaagatatatatattgatcagcgaaagacgattaagacgatgttggaatatgctgacaaggttttcacttacattttcattctggaaatgcttctaaaatgggtggcatatggctatcaaacatatttcaccaatgcctggtgttggctggacttcttaattgttgatgtttcattggtcagtttaacagcaaatgccttgggttactcagaacttggagccatcaaatctctcaggacactaagagctctgagacctctaagagccttatctcgatttgaagggatgagggtggttgtgaatgcccttttaggagcaattccatccatcatgaatgtgcttctggtttgtcttatattctggctaattttcagcatcatgggcgtaaatttgtttgctggcaaattctaccactgtattaacaccacaactggtgacaggtttgacatcgaagacgtgaataatcatactgattgcctaaaactaatagaaagaaatgagactgctcgatggaaaaatgtgaaagtaaactttgataatgtaggatttgggtatctctctttgcttcaagttgccacattcaaaggatggatggatataatgtatgcagcagttgattccagaaatgtggaactccagcctaagtatgaaaaaagtctgtacatgtatctttactttgttattttcatcatctttgggtccttcttcaccttgaacctgtttattggtgtcatcatagataatttcaaccagcagaaaaagaagtttggaggtcaagacatctttatgacagaagaacagaagaaatactataatgcaatgaaaaaattaggatcgaaaaaaccgcaaaagcctatacctcgaccaggaaacaaatttcaaggaatggtctttgacttcgtaaccagacaagtttttgacataagcatcatgattctcatctgtcttaacatggtcacaatgatggtggaaacagatgaccagagtgaatatgtgactaccattttgtcacgcatcaatctggtgttcattgtgctatttactggagagtgtgtactgaaactcatctctctatgccattattattttaccattggatggaatatttttgattttgtggttgtcattctctccattgtaggtatgtttcttgccgagctgatagaaaagtatttcgtgtcccctaccctgttccgagtgatccgtcttgctaggattggccgaatcctacgtctgatcaaaggagcaaaggggatccgcacgctgctctttgctttgatgatgtcccttcctgcgttgtttaacatcggcctcctactcttcctagtcatgttcatctacgccatctttgggatgtccaactttgcctatgttaagagggaagttgggatcgatgacatgttcaactttgagacctttggcaacagcatgatctgcctattccaaattacaacctctgctggctgggatggattgctagcacccattctcaacagtaagccacccgactgtgaccctaataaagttaaccctggaagctcagttaagggagactgtgggaacccatctgttggaattttcttttttgtcagttacatcatcatatccttcctggttgtggtgaacatgtacatcgcggtcatcctggagaacttcagtgttgctactgaagaaagtgcagagcctctgagtgaggatgactttgagatgttctatgaggtttgggagaagtttgatcccgatgcaactcagttcatggaatttgaaaaattatctcagtttgcagctgcgcttgaaccgcctctcaatctgccacaaccaaacaaactccagctcattgccatggatttgcccatggtgagtggtgaccggatccactgtcttgatatcttatttgcttttacaaagcgggttctaggagagagtggagagatggatgctctacgaatacagatggaagagcgattcatggcttccaatccttccaaggtctcctatcagccaatcactactactttaaaacgaaaacaagaggaagtatctgctgtcattattcagcgtgcttacagacgccaccttttaaagcgaactgtaaaacaagcttcctttacgtacaataaaaacaaaatcaaaggtggggctaatcttcttataaaagaagacatgataattgacagaataaatgaaaactctattacagaaaaaactgatctgaccatgtccactgcagcttgtccaccttcctatgaccgggtgacaaagccaattgtggaaaaacatgagcaagaaggcaaagatgaaaaagccaaagggaaataaatgaaaataaataaaaataattgggtgacaaattgtttacagcctgtgaaggtgatgtatttttatcaacaggactcctttaggaggtcaatgccaaactgactgtttttacacaaatctccttaaggtcagtgcctacaataagacagtgaccccttgtcagcaaactgtgactctgtgtaaaggggagatgaccttgacaggaggttactgttctcactaccagctgacactgctgaagataagatgcacaatggctagtcagactgtagggaccagtttcaaggggtgcaaacctgtgattttggggttgtttaacatgaaacactttagtgtagtaattgtatccactgtttgcatttcaactgccacatttgtcacatttttatggaatctgttagtggattcatctttttgttaatccatgtgtttattatatgtgactatttttgtaaacgaagtttctgttgagaaataggctaaggacctctataacaggtatgccacctggggggtatggcaaccacatggccctcccagctacacaaagtcgtggtttgcatgagggcatgctgcacttagagatcatgcatgagaaaaagtcacaagaaaaacaaattcttaaatttcaccatatttctgggaggggtaattgggtgataagtggaggtgctttgttgatcttgttttgcgaaatccagcccctagaccaagtagattatttgtgggtaggccagtaaatcttagcaggtgcaaacttcattcaaatgtttggagtcataaatgttatgtttctttttgttgtattaaaaaaaaaacctgaatagtgaatattgcccctcaccctccaccgccagaagactgaattgaccaaaattactctttataaatttctgctttttcctgcactttgtttagccatctttgggctctcagcaaggttgacactgtatatgttaatgaaatgctatttattatgtaaatagtcattttaccctgtggtgcacgtttgagcaaacaaataatgacctaagcacagtatttattgcatcaaatatgtaccacaagaaatgtagagtgcaagctttacacaggtaataaaatgtattctgtaccatttatagatagtttggatgctatcaatgcatgtttatattaccatgctgctgtatctggtttctctcactgctcagaatctcatttatgagaaaccatatgtcagtggtaaagtcaaggaaattgttcaacagatctcatttatttaagtcattaagcaatagtttgcagcactttaacagctttttggttatttttacattttaagtggataacatatggtatatagccagactgtacagacatgtttaaaaaaacacactgcttaacctattaaatatgtgtttagaattttataagcaaatataaatactgtaaaaagtcactttattttatttttcagcattatgtacataaatatgaagaggaaattatcttcaggttgatatcacaatcacttttcttactttctgtccatagtactttttcatgaaagaaatttgctaaataagacatgaaaacaagactgggtagttgtagatttctgctttttaaattacatttgctaattttagattatttcacaattttaaggagcaaaataggttcacgattcatatccaaattatgctttgcaattggaaaagggtttaaaattttatttatatttctggtagtacctgtactaactgaattgaaggtagtgcttatgttatttttgttctttttttctgacttcggtttatgttttcatttctttggagtaatgctgctctagattgttctaaatagaatgtgggcttcataatttttttttccacaaaaacagagtagtcaacttatatagtcaattacatcaggacattttgtgtttcttacagaagcaaaccataggctcctcttttccttaaaactacttagataaactgtattcgtgaactgcatgctggaaaatgctactattatgctaaataatgctaaccaacatttaaaatgtgcaaaactaataaagattacattttttatttt

SEQ ID NO: 40 - DNA, 8381 bp, Homo sapiens
atactgcagaggtctctggtgcatgtgtgtatgtgtgcgtttgtgtgtgtttgtgtgtctgtgtgttctgccccagtgagactgcagcccttgtaaatactttgacaccttttgcaagaaggaatctgaacaattgcaactgaaggcacattgttatcatctcgtctttgggtgatgctgttcctcactgcagatggataattttccttttaatcaggaatttcatatgcagaataaatggtaattaaaatgtgcaggatgacaagatggagcaaacagtgcttgtaccaccaggacctgacagcttcaacttcttcaccagagaatctcttgcggctattgaaagacgcattgcagaagaaaaggcaaagaatcccaaaccagacaaaaaagatgacgacgaaaatggcccaaagccaaatagtgacttggaagctggaaagaaccttccatttatttatggagacattcctccagagatggtgtcagagcccctggaggacctggacccctactatatcaataagaaaacttttatagtattgaataaattgaaggccatcttccggttcagtgccacctctgccctgtacattttaactcccttcaatcctcttaggaaaatagctattaagattttggtacattcattattcagcatgctaattatgtgcactattttgacaaactgtgtgtttatgacaatgagtaaccctcctgattggacaaagaatgtagaatacaccttcacaggaatatatacttttgaatcacttataaaaattattgcaaggggattctgtttagaagattttactttccttcgggatccatggaactggctcgatttcactgtcattacatttgcgtacgtcacagagtttgtggacctgggcaatgtctcggcattgagaacattcagagttctccgagcattgaagacgatttcagtcattccaggcctgaaaaccattgtgggagccctgatccagtctgtgaagaagctctcagatgtaatgatcctgactgtgttctgtctgagcgtatttgctctaattgggctgcagctgttcatgggcaacctgaggaataaatgtatacaatggcctcccaccaatgcttccttggaggaacatagtatagaaaagaatataactgtgaattataatggtacacttataaatgaaactgtctttgagtttgactggaagtcatatattcaagattcaagatatcattatttcctggagggttttttagatgcactactatgtggaaatagctctgatgcaggccaatgtccagagggatatatgtgtgtgaaagctggtagaaatcccaattatggctacacaagctttgataccttcagttgggcttttttgtccttgtttcgactaatgactcaggacttctgggaaaatctttatcaactgacattacgtgctgctgggaaaacgtacatgatattttttgtattggtcattttcttgggctcattctacctaataaatttgatcctggctgtggtggccatggcctacgaggaacagaatcaggccaccttggaagaagcagaacagaaagaggccgaatttcagcagatgattgaacagcttaaaaagcaacaggaggcagctcagcaggcagcaacggcaactgcctcagaacattccagagagcccagtgcagcaggcaggctctcagacagctcatctgaagcctctaagttgagttccaagagtgctaaggaaagaagaaatcggaggaagaaaagaaaacagaaagagcagtctggtggggaagagaaagatgaggatgaattccaaaaatctgaatctgaggacagcatcaggaggaaaggttttcgcttctccattgaagggaaccgattgacatatgaaaagaggtactcctccccacaccagtctttgttgagcatccgtggctccctattttcaccaaggcgaaatagcagaacaagccttttcagctttagagggcgagcaaaggatgtgggatctgagaacgacttcgcagatgatgagcacagcacctttgaggataacgagagccgtagagattccttgtttgtgccccgacgacacggagagagacgcaacagcaacctgagtcagaccagtaggtcatcccggatgctggcagtgtttccagcgaatgggaagatgcacagcactgtggattgcaatggtgtggtttccttggttggtggaccttcagttcctacatcgcctgttggacagcttctgccagaggtgataatagataagccagctactgatgacaatggaacaaccactgaaactgaaatgagaaagagaaggtcaagttctttccacgtttccatggactttctagaagatccttcccaaaggcaacgagcaatgagtatagccagcattctaacaaatacagtagaagaacttgaagaatccaggcagaaatgcccaccctgttggtataaattttccaacatattcttaatctgggactgttctccatattggttaaaagtgaaacatgttgtcaacctggttgtgatggacccatttgttgacctggccatcaccatctgtattgtcttaaatactcttttcatggccatggagcactatccaatgacggaccatttcaataatgtgcttacagtaggaaacttggttttcactgggatctttacagcagaaatgtttctgaaaattattgccatggatccttactattatttccaagaaggctggaatatctttgacggttttattgtgacgcttagcctggtagaacttggactcgccaatgtggaaggattatctgttctccgttcatttcgattgctgcgagttttcaagttggcaaaatcttggccaacgttaaatatgctaataaagatcatcggcaattccgtgggggctctgggaaatttaaccctcgtcttggccatcatcgtcttcatttttgccgtggtcggcatgcagctctttggtaaaagctacaaagattgtgtctgcaagatcgccagtgattgtcaactcccacgctggcacatgaatgacttcttccactccttcctgattgtgttccgcgtgctgtgtggggagtggatagagaccatgtgggactgtatggaggttgctggtcaagccatgtgccttactgtcttcatgatggtcatggtgattggaaacctagtggtcctgaatctctttctggccttgcttctgagctcatttagtgcagacaaccttgcagccactgatgatgataatgaaatgaataatctccaaattgctgtggataggatgcacaaaggagtagcttatgtgaaaagaaaaatatatgaatttattcaacagtccttcattaggaaacaaaagattttagatgaaattaaaccacttgatgatctaaacaacaagaaagacagttgtatgtccaatcatacaacagaaattgggaaagatcttgactatcttaaagatgtaaatggaactacaagtggtataggaactggcagcagtgttgaaaaatacattattgatgaaagtgattacatgtcattcataaacaaccccagtcttactgtgactgtaccaattgctgtaggagaatctgactttgaaaatttaaacacggaagactttagtagtgaatcggatctggaagaaagcaaagagaaactgaatgaaagcagtagctcatcagaaggtagcactgtggacatcggcgcacctgtagaagaacagcccgtagtggaacctgaagaaactcttgaaccagaagcttgtttcactgaaggctgtgtacaaagattcaagtgttgtcaaatcaatgtggaagaaggcagaggaaaacaatggtggaacctgagaaggacgtgtttccgaatagttgaacataactggtttgagaccttcattgttttcatgattctccttagtagtggtgctctggcatttgaagatatatatattgatcagcgaaagacgattaagacgatgttggaatatgctgacaaggttttcacttacattttcattctggaaatgcttctaaaatgggtggcatatggctatcaaacatatttcaccaatgcctggtgttggctggacttcttaattgttgatgtttcattggtcagtttaacagcaaatgccttgggttactcagaacttggagccatcaaatctctcaggacactaagagctctgagacctctaagagccttatctcgatttgaagggatgagggtggttgtgaatgcccttttaggagcaattccatccatcatgaatgtgcttctggtttgtcttatattctggctaattttcagcatcatgggcgtaaatttgtttgctggcaaattctaccactgtattaacaccacaactggtgacaggtttgacatcgaagacgtgaataatcatactgattgcctaaaactaatagaaagaaatgagactgctcgatggaaaaatgtgaaagtaaactttgataatgtaggatttgggtatctctctttgcttcaagttgccacattcaaaggatggatggatataatgtatgcagcagttgattccagaaatgtggaactccagcctaagtatgaaaaaagtctgtacatgtatctttactttgttattttcatcatctttgggtccttcttcaccttgaacctgtttattggtgtcatcatagataatttcaaccagcagaaaaagaagtttggaggtcaagacatctttatgacagaagaacagaagaaatactataatgcaatgaaaaaattaggatcgaaaaaaccgcaaaagcctatacctcgaccaggaaacaaatttcaaggaatggtctttgacttcgtaaccagacaagtttttgacataagcatcatgattctcatctgtcttaacatggtcacaatgatggtggaaacagatgaccagagtgaatatgtgactaccattttgtcacgcatcaatctggtgttcattgtgctatttactggagagtgtgtactgaaactcatctctctacgccattattattttaccattggatggaatatttttgattttgtggttgtcattctctccattgtaggtatgtttcttgccgagctgatagaaaagtatttcgtgtcccctaccctgttccgagtgatccgtcttgctaggattggccgaatcctacgtctgatcaaaggagcaaaggggatccacacgctgctctttgctttgatgatgtcccttcctgcgttgtttaacatcggcctcctactcttcctagtcatgttcatctacgccatctttgggatgtccaactttgcctatgttaagagggaagttgggatcgatgacatgttcaactttgagacctttggcaacagcatgatctgcctattccaaattacaacctctgctggctgggatggattgctagcacccattctcaacagtaagccacccgactgtgaccctaataaagttaaccctggaagctcagttaagggagactgtgggaacccatctgttggaattttcttttttgtcagttacatcatcatatccttcctggttgtggtgaacatgtacatcgcggtcatcctggagaacttcagtgttgctactgaagaaagtgcagagcctctgagtgaggatgactttgagatgttctatgaggtttgggagaagtttgatcccgatgcaactcagttcatggaatttgaaaaattatctcagtttgcagctgcgcttgaaccgcctctcaatctgccacaaccaaacaaactccagctcattgccatggatttgcccatggtgagtggtgaccggatccactgtcttgatatcttatttgcttttacaaagcgggttctaggagagagtggagagatggatgctctacgaatacagatggaagagcgattcatggcttccaatccttccaaggtctcctatcagccaatcactactactttaaaacgaaaacaagaggaagtatctgctgtcattattcagcgtgcttacagacgccaccttttaaagcgaactgtaaaacaagcttcctttacgtacaataaaaacaaaatcaaaggtggggctaatcttcttataaaagaagacatgataattgacagaataaatgaaaactctattacagaaaaaactgatctgaccatgtccactgcagcttgtccaccttcctatgaccgggtgacaaagccaattgtggaaaaacatgagcaagaaggcaaagatgaaaaagccaaagggaaataaatgaaaataaataaaaataattgggtgacaaattgtttacagcctgtgaaggtgatgtatttttatcaacaggactcctttaggaggtcaatgccaaactgactgtttttacacaaatctccttaaggtcagtgcctacaataagacagtgaccccttgtcagcaaactgtgactctgtgtaaaggggagatgaccttgacaggaggttactgttctcactaccagctgacactgctgaagataagatgcacaatggctagtcagactgtagggaccagtttcaaggggtgcaaacctgtgattttggggttgtttaacatgaaacactttagtgtagtaattgtatccactgtttgcatttcaactgccacatttgtcacatttttatggaatctgttagtggattcatctttttgttaatccatgtgtttattatatgtgactatttttgtaaacgaagtttctgttgagaaataggctaaggacctctataacaggtatgccacctggggggtatggcaaccacatggccctcccagctacacaaagtcgtggtttgcatgagggcatgctgcacttagagatcatgcatgagaaaaagtcacaagaaaaacaaattcttaaatttcaccatatttctgggaggggtaattgggtgataagtggaggtgctttgttgatcttgttttgcgaaatccagcccctagaccaagtagattatttgtgggtaggccagtaaatcttagcaggtgcaaacttcattcaaatgtttggagtcataaatgttatgtttctttttgttgtattaaaaaaaaaacctgaatagtgaatattgcccctcaccctccaccgccagaagactgaattgaccaaaattactctttataaatttctgctttttcctgcactttgtttagccatctttgggctctcagcaaggttgacactgtatatgttaatgaaatgctatttattatgtaaatagtcattttaccctgtggtgcacgtttgagcaaacaaataatgacctaagcacagtatttattgcatcaaatatgtaccacaagaaatgtagagtgcaagctttacacaggtaataaaatgtattctgtaccatttatagatagtttggatgctatcaatgcatgtttatattaccatgctgctgtatctggtttctctcactgctcagaatctcatttatgagaaaccatatgtcagtggtaaagtcaaggaaattgttcaacagatctcatttatttaagtcattaagcaatagtttgcagcactttaacagctttttggttatttttacattttaagtggataacatatggtatatagccagactgtacagacatgtttaaaaaaacacactgcttaacctattaaatatgtgtttagaattttataagcaaatataaatactgtaaaaagtcactttattttatttttcagcattatgtacataaatatgaagaggaaattatcttcaggttgatatcacaatcacttttcttactttctgtccatagtactttttcatgaaagaaatttgctaaataagacatgaaaacaagactgggtagttgtagatttctgctttttaaattacatttgctaattttagattatttcacaattttaaggagcaaaataggttcacgattcatatccaaattatgctttgcaattggaaaagggtttaaaattttatttatatttctggtagtacctgtactaactgaattgaaggtagtgcttatgttatttttgttctttttttctgacttcggtttatgttttcatttctttggagtaatgctgctctagattgttctaaatagaatgtgggcttcataatttttttttccacaaaaacagagtagtcaacttatatagtcaattacatcaggacattttgtgtttcttacagaagcaaaccataggctcctcttttccttaaaactacttagataaactgtattcgtgaactgcatgctggaaaatgctactattatgctaaataatgctaaccaacatttaaaatgtgcaaaactaataaagattacattttttatttt

SEQ ID NO: 41 - DNA, 457 bp, Homo sapiens
ctgcgagttttcaagttggcaaaatcttggccaacgttaaatatgctaataaagatcatcggcaattccgtgggggctctgggaaatttaaccctcgtcttggccatcatcgtcttcatttttgccgtggtcggcatgcagctctttggtaaaagctacaaagattgtgtctgcaagatcgccagtgattgtcaactcccacgctggcacatgaatgacttcttccactccttcctgattgtgttccgcgtgctgtgtggggagtggatagagaccatgtgggactgtatggaggttgctggtcaagccatgtgccttactgtcttcatgatggtcatggtgattggaaacctagtgttatgtacccacttaagatatgcattttggaaatacaccagcatggcacatgtatacatatgtaactaacctgcacattgtgcacatgtaccctaaaact

SEQ ID NO: 42 - protein, 2009 aa, Homo sapiens
MEQTVLVPPGPDSFNFFTRESLAAIERRIAEEKAKNPKPDKKDDDENGPKPNSDLEAGKNLPFIYGDIPPEMVSEPLEHLDPYYINKKTFIVLNKLKAIFRFSATSALYILTPFNPLRKIAIKILVHSLFSMLIMCTILTNCVFMTMSNPPDWTKNVEYTFTGIYTFESLIKIIARGFCLEDFTFLRDPWNWLDFTVITFAYVTEFVDLGNVSALRTFRVLRALKTISVIPGLKTIVGALIQSVKKLSDVMILTVFCLSVFALIGLQLFMGNLRNKCIQWPPTNASLEEHSIEKNITVNYNGTLINETVFEFDWKSYIQDSRYHYFLEGFLDALLCGNSSDAGQCPEGYMCVKAGRNPNYGYTSFDTFSWAFLSLFRLMTQDFWENLYQLTLRAAGKTYMIFFVLVIFLGSFYLINLILAVVAMAYEEQNQATLEEAEQKEAEFQQMIEQLKKQQEAAQQAATATASEHSREPSAAGRLSDSSSEASKLSSKSAKERRNRRKKRKQKEQSGGEEKDEDEFQKSESEDSIRRKGFRFSIEGNRLTYEKRYSSPHQSLLSIRGSLFSPRRNSRTSLFSFRGRAKDVGSENDFADDEHSTFEDNESRRDSLFVPRRHGERRNSNLSQTSRSSRMLAVFPANGKMHSTVDCNGVVSLVGGPSVPTSPVGQLLPEVIIDKPATDDNGTTTETEMRKRRSSSFHVSMDFLEDPSQRQRAMSIASILTNTVEELEESRQKCPPCWYKFSNIFLIWDCSPYWLKVKHVVNLVVMDPFVDLAITICIVLNTLFMAMEHYPMTDHFNNVLTVGNLVFTGIFTAEMFLKIIAMDPYYYFQEGWNIFDGFIVTLSLVELGLANVEGLSVLRSFRLLRVFKLAKSWPTLNMLIKIIGNSVGALGNLTLVLAIIVFIFAVVGMQLFGKSYKDCVCKIASDCQLPRWHMNDFFHSFLIVFRVLCGEWIETMWDCMEVAGQAMCLTVFMMVMVIGNLVVLNLFLALLLSSFSADNLAATDDDNEMNNLQIAVDRMHKGVAYVKRKIYEFIQQSFIRKQKILDEIKPLDDLNNKKDSCMSNHTTEIGKDLDYLKDVNGTTSGIGTGSSVEKYIIDESDYMSFINNPSLTVTVPIAVGESDFENLNTEDFSSESDLEESKEKLNESSSSSEGSTVDIGAPVEEQPVVEPEETLEPEACFTEGCVQRFKCCQINVEEGRGKQWWNLRRTCFRIVEHNWFETFIVFMILLSSGALAFEDIYIDQRKTIKTMLEYADKVFTYIFILEMLLKWVAYGYQTYFTNAWCWLDFLIVDVSLVSLTANALGYSELGAIKSLRTLRALRPLRALSRFEGMRVVVNALLGAIPSIMNVLLVCLIFWLIFSIMGVNLFAGKFYHCINTTTGDRFDIEDVNNHTDCLKLIERNETARWKNVKVNFDNVGFGYLSLLQVATFKGWMDIMYAAVDSRNVELQPKYEKSLYMYLYFVIFIIFGSFFTLNLFIGVIIDNFNQQKKKFGGQDIFMTEEQKKYYNAMKKLGSKKPQKPIPRPGNKFQGMVFDFVTRQVFDISIMILICLNMVTMMVETDDQSEYVTTILSRINLVFIVLFTGECVLKLISLRHYYFTIGWNIFDFVVVILSIVGMFLAELIEKYFVSPTLFRVIRLARIGRILRLIKGAKGIRTLLFALMMSLPALFNIGLLLFLVMFIYAIFGMSNFAYVKREVGIDDMFNFETFGNSMICLFQITTSAGWDGLLAPILNSKPPDCDPNKVNPGSSVKGDCGNPSVGIFFFVSYIIISFLVVVNMYIAVILENFSVATEESAEPLSEDDFEMFYEVWEKFDPDATQFMEFEKLSQFAAALEPPLNLPQPNKLQLIAMDLPMVSGDRIHCLDILFAFTKRVLGESGEMDALRIQMEERFMASNPSKVSYQPITTTLKRKQEEVSAVIIQRAYRRHLLKRTVKQASFTYNKNKIKGGANLLIKEDMIIDRINENSITEKTDLTMSTAACPPSYDRVTKPIVEKHEQEGKDEKAKGK

SEQ ID NO: 43 - protein, 2009 aa, Homo sapiens
MEQTVLVPPGPDSFNFFTRESLAAIERRIAEEKAKNPKPDKKDDDENGPKPNSDLEAGKNLPFIYGDIPPEMVSEPLEDLDPYYINKKTFIVLNKLKAIFRFSATSALYILTPFNPLRKIAIKILVHSLFSMLIMCTILTNCVFMTMSNPPDWTKNVEYTFTGIYTFESLIKIITRGFCLEDFTFLRDPWNWLDFTVITFAYVTEFVDLGNVSALRTFRVLRALKTISVIPGLKTIVGALIQSVKKLSDVMILTVFCLSVFALIGLQLFMGNLRNKCIQWPPTNASLEEHSIEKNITVNYNGTLINETVFEFDWKSYIQDSRYHYFLEGFLDALLCGNSSDAGQCPEGYMCVKAGRNPNYGYTSFDTFSWAFLSLFRLMTQDFWENLYQLTLRAAGKTYMIFFVLVIFLGSFYLINLILAVVAMAYEEQNQATLEEAEQKEAEFQQMIEQLKKQQEAAQQAATATASEHSREPSAAGRLSDSSSEASKLSSKSAKERRNRRKKRKQKEQSGGEEKDEDEFQKSESEDSIRRKGFRFSIEGNRLTYEKRYSSPHQSLLSIRGSLFSPRRNSRTSLFSFRGRAKDVGSENDFADDEHSTFEDNESRRDSLFVPRRHGERRNSNLSQTSRSSRMLAVFPANGKMHSTVDCNGVVSLVGGPSVPTSPVGQLLPEVIIDKPATDDNGTTTETEMRKRRSSSFHVSMDFLEDPSQRQRAMSIASILTNTVEELEESRQKCPPCWYKFSNIFLIWDCSPYWLKVKHVVNLVVMDPFVDLAITICIVLNTLFMAMEHYPMTDHFNNVLTVGNLVFTGIFTAEMFLKIIAMDPYYYFQEGWNIFDGFIVTLSLVELGLANVEGLSVLRSFRLLRVFKLAKSWPTLNMLIKIIGNSVGALGNLTLVLAIIVFIFAVVGMQLFGKSYKDCVCKIASDCQLPRWHMNDFFHSFLIVFRVLCGEWIETMWDCMEVAGQAMCLTVFMMVMVIGNLVVLNLFLALLLSSFSADNLAATDDDNEMNNLQIAVDRMHKGVAYVKRKIYEFIQQSFIRKQKILDEIKPLDDLNNKKDSCMSNHTTEIGKDLDYLKDVNGTTSGIGTGSSVEKYIIDESDYMSFINNPSLTVTVPIAVGESDFENLNTEDFSSESDLEESKEKLNESSSSSEGSTVDIGAPVEEQPVVEPEETLEPEACFTEGCVQRFKCCQINVEEGRGKQWWNLRRTCFRIVEHNWFETFIVFMILLSSGALAFEDIYIDQRKTIKTMLEYADKVFTYIFILEMLLKWVAYGYQTYFTNAWCWLDFLIVDVSLVSLTANALGYSELGAIKSLRTLRALRPLRALSRFEGMRVVVNALLGAIPSIMNVLLVCLIFWLIFSIMGVNLFAGKFYHCINTTTGDRFDIEDVNNHTDCLKLIERNETARWKNVKVNFDNVGFGYLSLLQVATFKGWMDIMYAAVDSRNVELQPKYEKSLYMYLYFVIFIIFGSFFTLNLFIGVIIDNFNQQKKKFGGQDIFMTEEQKKYYNAMKKLGSKKPQKPIPRPGNKFQGMVFDFVTRQVFDISIMILICLNMVTMMVETDDQSEYVTTILSRINLVFIVLFTGECVLKLISLRHYYFTIGWNIFDFVVVILSIVGMFLAELIEKYFVSPTLFRVIRLARIGRILRLIKGAKGIRTLLFALMMSLPALFNIGLLLFLVMFIYAIFGMSNFAYVKREVGIDDMFNFETFGNSMICLFQITTSAGWDGLLAPILNSKPPDCDPNKVNPGSSVKGDCGNPSVGIFFFVSYIIISFLVVVNMYIAVILENFSVATEESAEPLSEDDFEMFYEVWEKFDPDATQFMEFEKLSQFAAALEPPLNLPQPNKLQLIAMDLPMVSGDRIHCLDILFAFTKRVLGESGEMDALRIQMEERFMASNPSKVSYQPITTTLKRKQEEVSAVIIQRAYRRHLLKRTVKQASFTYNKNKIKGGANLLIKEDMIIDRINENSITEKTDLTMSTAACPPSYDRVTKPIVEKHEQEGKDEKAKGK

SEQ ID NO: 44 - protein, 2009 aa, Homo sapiens
MEQTVLVPPGPDSFNFFTRESLAAIERRIAEEKAKNPKPDKKDDDENGPKPNSDLEAGKNLPFIYGDIPPEMVSEPLEDLDPYYINKKTFIVLNKLKAIFRFSATSALYILTPFNPLRKIAIKILVHSLFSMLIMCTILTNCVFMTMSNPPDWTKNVEYTFTGIYTFESLIKIIARGFCLEDFTFLRDPWNWLDFTVITFAYVTEFVDLGNVSALRTFRVLRALKTISVIPGLKTIVGTLIQSVKKLSDVMILTVFCLSVFALIGLQLFMGNLRNKCIQWPPTNASLEEHSIEKNITVNYNGTLINETVFEFDWKSYIQDSRYHYFLEGFLDALLCGNSSDAGQCPEGYMCVKAGRNPNYGYTSFDTFSWAFLSLFRLMTQDFWENLYQLTLRAAGKTYMIFFVLVIFLGSFYLINLILAVVAMAYEEQNQATLEEAEQKEAEFQQMIEQLKKQQEAAQQAATATASEHSREPSAAGRLSDSSSEASKLSSKSAKERRNRRKKRKQKEQSGGEEKDEDEFQKSESEDSIRRKGFRFSIEGNRLTYEKRYSSPHQSLLSIRGSLFSPRRNSRTSLFSFRGRAKDVGSENDFADDEHSTFEDNESRRDSLFVPRRHGERRNSNLSQTSRSSRMLAVFPANGKMHSTVDCNGVVSLVGGPSVPTSPVGQLLPEVIIDKPATDDNGTTTETEMRKRRSSSFHVSMDFLEDPSQRQRAMSIASILTNTVEELEESRQKCPPCWYKFSNIFLIWDCSPYWLKVKHVVNLVVMDPFVDLAITICIVLNTLFMAMEHYPMTDHFNNVLTVGNLVFTGIFTAEMFLKIIAMDPYYYFQEGWNIFDGFIVTLSLVELGLANVEGLSVLRSFRLLRVFKLAKSWPTLNMLIKIIGNSVGALGNLTLVLAIIVFIFAVVGMQLFGKSYKDCVCKIASDCQLPRWHMNDFFHSFLIVFRVLCGEWIETMWDCMEVAGQAMCLTVFMMVMVIGNLVVLNLFLALLLSSFSADNLAATDDDNEMNNLQIAVDRMHKGVAYVKRKIYEFIQQSFIRKQKILDEIKPLDDLNNKKDSCMSNHTTEIGKDLDYLKDVNGTTSGIGTGSSVEKYIIDESDYMSFINNPSLTVTVPIAVGESDFENLNTEDFSSESDLEESKEKLNESSSSSEGSTVDIGAPVEEQPVVEPEETLEPEACFTEGCVQRFKCCQINVEEGRGKQWWNLRRTCFRIVEHNWFETFIVFMILLSSGALAFEDIYIDQRKTIKTMLEYADKVFTYIFILEMLLKWVAYGYQTYFTNAWCWLDFLIVDVSLVSLTANALGYSELGAIKSLRTLRALRPLRALSRFEGMRVVVNALLGAIPSIMNVLLVCLIFWLIFSIMGVNLFAGKFYHCINTTTGDRFDIEDVNNHTDCLKLIERNETARWKNVKVNFDNVGFGYLSLLQVATFKGWMDIMYAAVDSRNVELQPKYEKSLYMYLYFVIFIIFGSFFTLNLFIGVIIDNFNQQKKKFGGQDIFMTEEQKKYYNAMKKLGSKKPQKPIPRPGNKFQGMVFDFVTRQVFDISIMILICLNMVTMMVETDDQSEYVTTILSRINLVFIVLFTGECVLKLISLRHYYFTIGWNIFDFVVVILSIVGMFLAELIEKYFVSPTLFRVIRLARIGRILRLIKGAKGIRTLLFALMMSLPALFNIGLLLFLVMFIYAIFGMSNFAYVKREVGIDDMFNFETFGNSMICLFQITTSAGWDGLLAPILNSKPPDCDPNKVNPGSSVKGDCGNPSVGIFFFVSYIIISFLVVVNMYIAVILENFSVATEESAEPLSEDDFEMFYEVWEKFDPDATQFMEFEKLSQFAAALEPPLNLPQPNKLQLIAMDLPMVSGDRIHCLDILFAFTKRVLGESGEMDALRIQMEERFMASNPSKVSYQPITTTLKRKQEEVSAVIIQRAYRRHLLKRTVKQASFTYNKNKIKGGANLLIKEDMIIDRINENSITEKTDLTMSTAACPPSYDRVTKPIVEKHEQEGKDEKAKGK

SEQ ID NO: 45 - protein, 2009 aa, Homo sapiens
MEQTVLVPPGPDSFNFFTRESLAAIERRIAEEKAKNPKPDKKDDDENGPKPNSDLEAGKNLPFIYGDIPPEMVSEPLEDLDPYYINKKTFIVLNKLKAIFRFSATSALYILTPFNPLRKIAIKILVHSLFSMLIMCTILTNCVFMTMSNPPDWTKNVEYTFTGIYTFESLIKIIARGFCLEDFTFLRDPWNWLDFTVITFAYVTEFVDLGNVSALRTFRVLRALKTISVIPGLKTIVGALIQSVKKLSDVMILTVFCLSVFALIGLQLFMGNLRNKCIQWPPTNASLEEHSIEKNITVNYNGTLINETVFEFDWKSYIQDSRYHYFLEGFLDALLCGNSSDAGQCPEGYMCVKAGRNPNYGYTSFDTFSWAFLSLFRLMTQDFWENLYQLTLRAAGKTYMIFFVLVIFLGSFYLINLILAVVAMAYEEQNQATLEEAEQKEAEFQQMIEQLKKQQEAAQQAATATASEHSREPSAAGRLSDSSSEASKLSSKSAKERRNRRKKRKQKEQSGGEEKDEDEFQKSESEDSIRRKGFRFSIEGNRLTYEKRYSSPHQSLLSIRGSLFSPRRNSRTSLFSFRGRAKDVGSENDFADDEHSTFEDNESRRDSLFVPRRHGERRNSNLSQTSRSSRMLAVFPANGKMHSTVDCNGVVSLVGGPSVPTSPVGQLLPEVIIGKPATDDNGTTTETEMRKRRSSSFHVSMDFLEDPSQRQRAMSIASILTNTVEELEESRQKCPPCWYKFSNIFLIWDCSPYWLKVKHVVNLVVMDPFVDLAITICIVLNTLFMAMEHYPMTDHFNNVLTVGNLVFTGIFTAEMFLKIIAMDPYYYFQEGWNIFDGFIVTLSLVELGLANVEGLSVLRSFRLLRVFKLAKSWPTLNMLIKIIGNSVGALGNLTLVLAIIVFIFAVVGMQLFGKSYKDCVCKIASDCQLPRWHMNDFFHSFLIVFRVLCGEWIETMWDCMEVAGQAMCLTVFMMVMVIGNLVVLNLFLALLLSSFSADNLAATDDDNEMNNLQIAVDRMHKGVAYVKRKIYEFIQQSFIRKQKILDEIKPLDDLNNKKDSCMSNHTTEIGKDLDYLKDVNGTTSGIGTGSSVEKYIIDESDYMSFINNPSLTVTVPIAVGESDFENLNTEDFSSESDLEESKEKLNESSSSSEGSTVDIGAPVEEQPVVEPEETLEPEACFTEGCVQRFKCCQINVEEGRGKQWWNLRRTCFRIVEHNWFETFIVFMILLSSGALAFEDIYIDQRKTIKTMLEYADKVFTYIFILEMLLKWVAYGYQTYFTNAWCWLDFLIVDVSLVSLTANALGYSELGAIKSLRTLRALRPLRALSRFEGMRVVVNALLGAIPSIMNVLLVCLIFWLIFSIMGVNLFAGKFYHCINTTTGDRFDIEDVNNHTDCLKLIERNETARWKNVKVNFDNVGFGYLSLLQVATFKGWMDIMYAAVDSRNVELQPKYEKSLYMYLYFVIFIIFGSFFTLNLFIGVIIDNFNQQKKKFGGQDIFMTEEQKKYYNAMKKLGSKKPQKPIPRPGNKFQGMVFDFVTRQVFDISIMILICLNMVTMMVETDDQSEYVTTILSRINLVFIVLFTGECVLKLISLRHYYFTIGWNIFDFVVVILSIVGMFLAELIEKYFVSPTLFRVIRLARIGRILRLIKGAKGIRTLLFALMMSLPALFNIGLLLFLVMFIYAIFGMSNFAYVKREVGIDDMFNFETFGNSMICLFQITTSAGWDGLLAPILNSKPPDCDPNKVNPGSSVKGDCGNPSVGIFFFVSYIIISFLVVVNMYIAVILENFSVATEESAEPLSEDDFEMFYEVWEKFDPDATQFMEFEKLSQFAAALEPPLNLPQPNKLQLIAMDLPMVSGDRIHCLDILFAFTKRVLGESGEMDALRIQMEERFMASNPSKVSYQPITTTLKRKQEEVSAVIIQRAYRRHLLKRTVKQASFTYNKNKIKGGANLLIKEDMIIDRINENSITEKTDLTMSTAACPPSYDRVTKPIVEKHEQEGKDEKAKGK

SEQ ID NO: 46 - protein, 2009 aa, Homo sapiens
MEQTVLVPPGPDSFNFFTRESLAAIERRIAEEKAKNPKPDKKDDDENGPKPNSDLEAGKNLPFIYGDIPPEMVSEPLEDLDPYYINKKTFIVLNKLKAIFRFSATSALYILTPFNPLRKIAIKILVHSLFSMLIMCTILTNCVFMTMSNPPDWTKNVEYTFTGIYTFESLIKIIARGFCLEDFTFLRDPWNWLDFTVITFAYVTEFVDLGNVSALRTFRVLRALKTISVIPGLKTIVGALIQSVKKLSDVMILTVFCLSVFALIGLQLFMGNLRNKCIQWPPTNASLEEHSIEKNITVNYNGTLINETVFEFDWKSYIQDSRYHYFLEGFLDALLCGNSSDAGQCPEGYMCVKAGRNPNYGYTSFDTFSWAFLSLFRLMTQDFWENLYQLTLRAAGKTYMIFFVLVIFLGSFYLINLILAVVAMAYEEQNQATLEEAEQKEAEFQQMIEQLKKQQEAAQQAATATASEHSREPSAAGRLSDSSSEASKLSSKSAKERRNRRKKRKQKEQSGGEEKDEDEFQKSESEDSIRRKGFRFSIEGNRLTYEKRYSSPHQSLLSIRGSLFSPRRNSRTSLFSFRGRAKDVGSENDFADDEHSTFEDNESRRDSLFVPRRHGERRNSNLSQTSRSSRMLAVFPANGKMHSTVDCNGVVSLVGGPSVPTSPVGQLLPEVIIDKPATDDNGTTTETEMRKRRSSSFHVSMDFLEDPSQRQRAMSIASILTNTVEELEESRQKCPPCWYKFSNIFLIWDCSPYWLKVKHVVNLVVMDPFVDLAITICIVLNTPFMAMEHYPMTDHFNNVLTVGNLVFTGIFTAEMFLKIIAMDPYYYFQEGWNIFDGFIVTLSLVELGLANVEGLSVLRSFRLLRVFKLAKSWPTLNMLIKIIGNSVGALGNLTLVLAIIVFIFAVVGMQLFGKSYKDCVCKIASDCQLPRWHMNDFFHSFLIVFRVLCGEWIETMWDCMEVAGQAMCLTVFMMVMVIGNLVVLNLFLALLLSSFSADNLAATDDDNEMNNLQIAVDRMHKGVAYVKRKIYEFIQQSFIRKQKILDEIKPLDDLNNKKDSCMSNHTTEIGKDLDYLKDVNGTTSGIGTGSSVEKYIIDESDYMSFINNPSLTVTVPIAVGESDFENLNTEDFSSESDLEESKEKLNESSSSSEGSTVDIGAPVEEQPVVEPEETLEPEACFTEGCVQRFKCCQINVEEGRGKQWWNLRRTCFRIVEHNWFETFIVFMILLSSGALAFEDIYIDQRKTIKTMLEYADKVFTYIFILEMLLKWVAYGYQTYFTNAWCWLDFLIVDVSLVSLTANALGYSELGAIKSLRTLRALRPLRALSRFEGMRVVVNALLGAIPSIMNVLLVCLIFWLIFSIMGVNLFAGKFYHCINTTTGDRFDIEDVNNHTDCLKLIERNETARWKNVKVNFDNVGFGYLSLLQVATFKGWMDIMYAAVDSRNVELQPKYEKSLYMYLYFVIFIIFGSFFTLNLFIGVIIDNFNQQKKKFGGQDIFMTEEQKKYYNAMKKLGSKKPQKPIPRPGNKFQGMVFDFVTRQVFDISIMILICLNMVTMMVETDDQSEYVTTILSRINLVFIVLFTGECVLKLISLRHYYFTIGWNIFDFVVVILSIVGMFLAELIEKYFVSPTLFRVIRLARIGRILRLIKGAKGIRTLLFALMMSLPALFNIGLLLFLVMFIYAIFGMSNFAYVKREVGIDDMFNFETFGNSMICLFQITTSAGWDGLLAPILNSKPPDCDPNKVNPGSSVKGDCGNPSVGIFFFVSYIIISFLVVVNMYIAVILENFSVATEESAEPLSEDDFEMFYEVWEKFDPDATQFMEFEKLSQFAAALEPPLNLPQPNKLQLIAMDLPMVSGDRIHCLDILFAFTKRVLGESGEMDALRIQMEERFMASNPSKVSYQPITTTLKRKQEEVSAVIIQRAYRRHLLKRTVKQASFTYNKNKIKGGANLLIKEDMIIDRINENSITEKTDLTMSTAACPPSYDRVTKPIVEKHEQEGKDEKAKGK

SEQ ID NO: 47 - protein, 2009 aa, Homo sapiens
MEQTVLVPPGPDSFNFFTRESLAAIERRIAEEKAKNPKPDKKDDDENGPKPNSDLEAGKNLPFIYGDIPPEMVSEPLEDLDPYYINKKTFIVLNKLKAIFRFSATSALYILTPFNPLRKIAIKILVHSLFSMLIMCTILTNCVFMTMSNPPDWTKNVEYTFTGIYTFESLIKIIARGFCLEDFTFLRDPWNWLDFTVITFAYVTEFVDLGNVSALRTFRVLRALKTISVIPGLKTIVGALIQSVKKLSDVMILTVFCLSVFALIGLQLFMGNLRNKCIQWPPTNASLEEHSIEKNITVNYNGTLINETVFEFDWKSYIQDSRYHYFLEGFLDALLCGNSSDAGQCPEGYMCVKAGRNPNYGYTSFDTFSWAFLSLFRLMTQDFWENLYQLTLRAAGKTYMIFFVLVIFLGSFYLINLILAVVAMAYEEQNQATLEEAEQKEAEFQQMIEQLKKQQEAAQQAATATASEHSREPSAAGRLSDSSSEASKLSSKSAKERRNRRKKRKQKEQSGGEEKDEDEFQKSESEDSIRRKGFRFSIEGNRLTYEKRYSSPHQSLLSIRGSLFSPRRNSRTSLFSFRGRAKDVGSENDFADDEHSTFEDNESRRDSLFVPRRHGERRNSNLSQTSRSSRMLAVFPANGKMHSTVDCNGVVSLVGGPSVPTSPVGQLLPEVIIDKPATDDNGTTTETEMRKRRSSSFHVSMDFLEDPSQRQRAMSIASILTNTVEELEESRQKCPPCWYKFSNIFLIWDCSPYWLKVKHVVNLVVMDPFVDLAITICIVLNTLFMAMEHYPMTDHFNNVLTVGNLVFTGIFTAEMFLKIIAMDPYYYFQEGWNIFDGFIVTLSLVELGLANVEGLSVLRSFRLLRVFKLAKSWPTLNMLIKIIGNSVGALGNLTLVLAIIVFIFAVVGMQLFGKSYKDCVCKIASDCQLPRWHMNDFFHSFLIEFRVLCGEWIETMWDCMEVAGQAMCLTVFMMVMVIGNLVVLNLFLALLLSSFSADNLAATDDDNEMNNLQIAVDRMHKGVAYVKRKIYEFIQQSFIRKQKILDEIKPLDDLNNKKDSCMSNHTTEIGKDLDYLKDVNGTTSGIGTGSSVEKYIIDESDYMSFINNPSLTVTVPIAVGESDFENLNTEDFSSESDLEESKEKLNESSSSSEGSTVDIGAPVEEQPVVEPEETLEPEACFTEGCVQRFKCCQINVEEGRGKQWWNLRRTCFRIVEHNWFETFIVFMILLSSGALAFEDIYIDQRKTIKTMLEYADKVFTYIFILEMLLKWVAYGYQTYFTNAWCWLDFLIVDVSLVSLTANALGYSELGAIKSLRTLRALRPLRALSRFEGMRVVVNALLGAIPSIMNVLLVCLIFWLIFSIMGVNLFAGKFYHCINTTTGDRFDIEDVNNHTDCLKLIERNETARWKNVKVNFDNVGFGYLSLLQVATFKGWMDIMYAAVDSRNVELQPKYEKSLYMYLYFVIFIIFGSFFTLNLFIGVIIDNFNQQKKKFGGQDIFMTEEQKKYYNAMKKLGSKKPQKPIPRPGNKFQGMVFDFVTRQVFDISIMILICLNMVTMMVETDDQSEYVTTILSRINLVFIVLFTGECVLKLISLRHYYFTIGWNIFDFVVVILSIVGMFLAELIEKYFVSPTLFRVIRLARIGRILRLIKGAKGIRTLLFALMMSLPALFNIGLLLFLVMFIYAIFGMSNFAYVKREVGIDDMFNFETFGNSMICLFQITTSAGWDGLLAPILNSKPPDCDPNKVNPGSSVKGDCGNPSVGIFFFVSYIIISFLVVVNMYIAVILENFSVATEESAEPLSEDDFEMFYEVWEKFDPDATQFMEFEKLSQFAAALEPPLNLPQPNKLQLIAMDLPMVSGDRIHCLDILFAFTKRVLGESGEMDALRIQMEERFMASNPSKVSYQPITTTLKRKQEEVSAVIIQRAYRRHLLKRTVKQASFTYNKNKIKGGANLLIKEDMIIDRINENSITEKTDLTMSTAACPPSYDRVTKPIVEKHEQEGKDEKAKGK

SEQ ID NO: 48 - protein, 2009 aa, Homo sapiens
MEQTVLVPPGPDSFNFFTRESLAAIERRIAEEKAKNPKPDKKDDDENGPKPNSDLEAGKNLPFIYGDIPPEMVSEPLEDLDPYYINKKTFIVLNKLKAIFRFSATSALYILTPFNPLRKIAIKILVHSLFSMLIMCTILTNCVFMTMSNPPDWTKNVEYTFTGIYTFESLIKIIARGFCLEDFTFLRDPWNWLDFTVITFAYVTEFVDLGNVSALRTFRVLRALKTISVIPGLKTIVGALIQSVKKLSDVMILTVFCLSVFALIGLQLFMGNLRNKCIQWPPTNASLEEHSIEKNITVNYNGTLINETVFEFDWKSYIQDSRYHYFLEGFLDALLCGNSSDAGQCPEGYMCVKAGRNPNYGYTSFDTFSWAFLSLFRLMTQDFWENLYQLTLRAAGKTYMIFFVLVIFLGSFYLINLILAVVAMAYEEQNQATLEEAEQKEAEFQQMIEQLKKQQEAAQQAATATASEHSREPSAAGRLSDSSSEASKLSSKSAKERRNRRKKRKQKEQSGGEEKDEDEFQKSESEDSIRRKGFRFSIEGNRLTYEKRYSSPHQSLLSIRGSLFSPRRNSRTSLFSFRGRAKDVGSENDFADDEHSTFEDNESRRDSLFVPRRHGERRNSNLSQTSRSSRMLAVFPANGKMHSTVDCNGVVSLVGGPSVPTSPVGQLLPEVIIDKPATDDNGTTTETEMRKRRSSSFHVSMDFLEDPSQRQRAMSIASILTNTVEELEESRQKCPPCWYKFSNIFLIWDCSPYWLKVKHVVNLVVMDPFVDLAITICIVLNTLFMAMEHYPMTDHFNNVLTVGNLVFTGIFTAEMFLKIIAMDPYYYFQEGWNIFDGFIVTLSLVELGLANVEGLSVLRSFRLLRVFKLAKSWPTLNMLIKIIGNSVGALGNLTLVLAIIVFIFAVVGMQLFGKSYKDCVCKIASDCQLPRWHMNDFFHSFLIVLRVLCGEWIETMWDCMEVAGQAMCLTVFMMVMVIGNLVVLNLFLALLLSSFSADNLAATDDDNEMNNLQIAVDRMHKGVAYVKRKIYEFIQQSFIRKQKILDEIKPLDDLNNKKDSCMSNHTTEIGKDLDYLKDVNGTTSGIGTGSSVEKYIIDESDYMSFINNPSLTVTVPIAVGESDFENLNTEDFSSESDLEESKEKLNESSSSSEGSTVDIGAPVEEQPVVEPEETLEPEACFTEGCVQRFKCCQINVEEGRGKQWWNLRRTCFRIVEHNWFETFIVFMILLSSGALAFEDIYIDQRKTIKTMLEYADKVFTYIFILEMLLKWVAYGYQTYFTNAWCWLDFLIVDVSLVSLTANALGYSELGAIKSLRTLRALRPLRALSRFEGMRVVVNALLGAIPSIMNVLLVCLIFWLIFSIMGVNLFAGKFYHCINTTTGDRFDIEDVNNHTDCLKLIERNETARWKNVKVNFDNVGFGYLSLLQVATFKGWMDIMYAAVDSRNVELQPKYEKSLYMYLYFVIFIIFGSFFTLNLFIGVIIDNFNQQKKKFGGQDIFMTEEQKKYYNAMKKLGSKKPQKPIPRPGNKFQGMVFDFVTRQVFDISIMILICLNMVTMMVETDDQSEYVTTILSRINLVFIVLFTGECVLKLISLRHYYFTIGWNIFDFVVVILSIVGMFLAELIEKYFVSPTLFRVIRLARIGRILRLIKGAKGIRTLLFALMMSLPALFNIGLLLFLVMFIYAIFGMSNFAYVKREVGIDDMFNFETFGNSMICLFQITTSAGWDGLLAPILNSKPPDCDPNKVNPGSSVKGDCGNPSVGIFFFVSYIIISFLVVVNMYIAVILENFSVATEESAEPLSEDDFEMFYEVWEKFDPDATQFMEFEKLSQFAAALEPPLNLPQPNKLQLIAMDLPMVSGDRIHCLDILFAFTKRVLGESGEMDALRIQMEERFMASNPSKVSYQPITTTLKRKQEEVSAVIIQRAYRRHLLKRTVKQASFTYNKNKIKGGANLLIKEDMIIDRINENSITEKTDLTMSTAACPPSYDRVTKPIVEKHEQEGKDEKAKGK

SEQ ID NO: 49 - protein, 2009 aa, Homo sapiens
MEQTVLVPPGPDSFNFFTRESLAAIERRIAEEKAKNPKPDKKDDDENGPKPNSDLEAGKNLPFIYGDIPPEMVSEPLEDLDPYYINKKTFIVLNKLKAIFRFSATSALYILTPFNPLRKIAIKILVHSLFSMLIMCTILTNCVFMTMSNPPDWTKNVEYTFTGIYTFESLIKIIARGFCLEDFTFLRDPWNWLDFTVITFAYVTEFVDLGNVSALRTFRVLRALKTISVIPGLKTIVGALIQSVKKLSDVMILTVFCLSVFALIGLQLFMGNLRNKCIQWPPTNASLEEHSIEKNITVNYNGTLINETVFEFDWKSYIQDSRYHYFLEGFLDALLCGNSSDAGQCPEGYMCVKAGRNPNYGYTSFDTFSWAFLSLFRLMTQDFWENLYQLTLRAAGKTYMIFFVLVIFLGSFYLINLILAVVAMAYEEQNQATLEEAEQKEAEFQQMIEQLKKQQEAAQQAATATASEHSREPSAAGRLSDSSSEASKLSSKSAKERRNRRKKRKQKEQSGGEEKDEDEFQKSESEDSIRRKGFRFSIEGNRLTYEKRYSSPHQSLLSIRGSLFSPRRNSRTSLFSFRGRAKDVGSENDFADDEHSTFEDNESRRDSLFVPRRHGERRNSNLSQTSRSSRMLAVFPANGKMHSTVDCNGVVSLVGGPSVPTSPVGQLLPEVIIDKPATDDNGTTTETEMRKRRSSSFHVSMDFLEDPSQRQRAMSIASILTNTVEELEESRQKCPPCWYKFSNIFLIWDCSPYWLKVKHVVNLVVMDPFVDLAITICIVLNTLFMAMEHYPMTDHFNNVLTVGNLVFTGIFTAEMFLKIIAMDPYYYFQEGWNIFDGFIVTLSLVELGLANVEGLSVLRSFRLLRVFKLAKSWPTLNMLIKIIGNSVGALGNLTLVLAIIVFIFAVVGMQLFGKSYKDCVCKIASDCQLPRWHMNDFFHSFLIVFRVLCEEWIETMWDCMEVAGQAMCLTVFMMVMVIGNLVVLNLFLALLLSSFSADNLAATDDDNEMNNLQIAVDRMHKGVAYVKRKIYEFIQQSFIRKQKILDEIKPLDDLNNKKDSCMSNHTTEIGKDLDYLKDVNGTTSGIGTGSSVEKYIIDESDYMSFINNPSLTVTVPIAVGESDFENLNTEDFSSESDLEESKEKLNESSSSSEGSTVDIGAPVEEQPVVEPEETLEPEACFTEGCVQRFKCCQINVEEGRGKQWWNLRRTCFRIVEHNWFETFIVFMILLSSGALAFEDIYIDQRKTIKTMLEYADKVFTYIFILEMLLKWVAYGYQTYFTNAWCWLDFLIVDVSLVSLTANALGYSELGAIKSLRTLRALRPLRALSRFEGMRVVVNALLGAIPSIMNVLLVCLIFWLIFSIMGVNLFAGKFYHCINTTTGDRFDIEDVNNHTDCLKLIERNETARWKNVKVNFDNVGFGYLSLLQVATFKGWMDIMYAAVDSRNVELQPKYEKSLYMYLYFVIFIIFGSFFTLNLFIGVIIDNFNQQKKKFGGQDIFMTEEQKKYYNAMKKLGSKKPQKPIPRPGNKFQGMVFDFVTRQVFDISIMILICLNMVTMMVETDDQSEYVTTILSRINLVFIVLFTGECVLKLISLRHYYFTIGWNIFDFVVVILSIVGMFLAELIEKYFVSPTLFRVIRLARIGRILRLIKGAKGIRTLLFALMMSLPALFNIGLLLFLVMFIYAIFGMSNFAYVKREVGIDDMFNFETFGNSMICLFQITTSAGWDGLLAPILNSKPPDCDPNKVNPGSSVKGDCGNPSVGIFFFVSYIIISFLVVVNMYIAVILENFSVATEESAEPLSEDDFEMFYEVWEKFDPDATQFMEFEKLSQFAAALEPPLNLPQPNKLQLIAMDLPMVSGDRIHCLDILFAFTKRVLGESGEMDALRIQMEERFMASNPSKVSYQPITTTLKRKQEEVSAVIIQRAYRRHLLKRTVKQASFTYNKNKIKGGANLLIKEDMIIDRINENSITEKTDLTMSTAACPPSYDRVTKPIVEKHEQEGKDEKAKGK

SEQ ID NO: 50 - protein, 2009 aa, Homo sapiens
MEQTVLVPPGPDSFNFFTRESLAAIERRIAEEKAKNPKPDKKDDDENGPKPNSDLEAGKNLPFIYGDIPPEMVSEPLEDLDPYYINKKTFIVLNKLKAIFRFSATSALYILTPFNPLRKIAIKILVHSLFSMLIMCTILTNCVFMTMSNPPDWTKNVEYTFTGIYTFESLIKIIARGFCLEDFTFLRDPWNWLDFTVITFAYVTEFVDLGNVSALRTFRVLRALKTISVIPGLKTIVGALIQSVKKLSDVMILTVFCLSVFALIGLQLFMGNLRNKCIQWPPTNASLEEHSIEKNITVNYNGTLINETVFEFDWKSYIQDSRYHYFLEGFLDALLCGNSSDAGQCPEGYMCVKAGRNPNYGYTSFDTFSWAFLSLFRLMTQDFWENLYQLTLRAAGKTYMIFFVLVIFLGSFYLINLILAVVAMAYEEQNQATLEEAEQKEAEFQQMIEQLKKQQEAAQQAATATASEHSREPSAAGRLSDSSSEASKLSSKSAKERRNRRKKRKQKEQSGGEEKDEDEFQKSESEDSIRRKGFRFSIEGNRLTYEKRYSSPHQSLLSIRGSLFSPRRNSRTSLFSFRGRAKDVGSENDFADDEHSTFEDNESRRDSLFVPRRHGERRNSNLSQTSRSSRMLAVFPANGKMHSTVDCNGVVSLVGGPSVPTSPVGQLLPEVIIDKPATDDNGTTTETEMRKRRSSSFHVSMDFLEDPSQRQRAMSIASILTNTVEELEESRQKCPPCWYKFSNIFLIWDCSPYWLKVKHVVNLVVMDPFVDLAITICIVLNTLFMAMEHYPMTDHFNNVLTVGNLVFTGIFTAEMFLKIIAMDPYYYFQEGWNIFDGFIVTLSLVELGLANVEGLSVLRSFRLLRVFKLAKSWPTLNMLIKIIGNSVGALGNLTLVLAIIVFIFAVVGMQLFGKSYKDCVCKIASDCQLPRWHMNDFFHSFLIVFRVLCGEWIETMWDCMEVAGQAMCLTVFMMVMVIGNLVVLNLFLALLLSSFSADNLAATDDDNEMNNLQIAVDRMHKGVAYVKRKIYEFIQQSFIRKQKILDEIKPLDDLNNKKDSCMSNHTTEIGKDLDYLKDVNGTTSGIGTGSSVEKYIIDESDYMSFINNPSLTVTVPIAVGESDFENLNTEDFSSESDLEESKEKLNESSSSSEGSTVDIGAPVEEQPVVEPEETLEPEACFTEGCVQRFKCCQINVEEGRGKQWWNLRRTCFRIVEHNWFETFIVFMILLSSGALAFEDIYIDQRKTIKTMLEYADKVFTYIFILEMLLKWVAYGYQTYFTNAWCWLDFLIVDVSLVSLTANALGYSELGAIKSLRTLRALRPLRALSRFEGMRVVVNALLGAIPSIMNVLLVCLIFWLIFSIMGVNLFAGKFYHCINTTTGDRFDIEDVNNHTDCLKLIERNETARWKNVKVNFDNVGFGYLSLLQVATFKGWMDIMYAAVDSRNVELQPKYEKSLYMYLYFVIFIIFGSFFTLNLFIGVIIDNFNQQKKKFGGQDIFMTEEQKKYYNAMKKLGSKKPQKPIPRPGNKFQGMVFDFVTRQVFDISIMILICLNMVTMMVETDDQSEYVTTILSRINLVFIVLFTGECVLKLISLRHYYFTIGWNIFDFVVVILSIVGMFLAELIEKYFVSPTLFRVIRLARIGRILRLIKGAKGIRTLLFALMMSLPALFNIGLLLFLVMFIYAIFGMSNFAYVKREVGIDDMFNFETFGNSMICLFQIRTSAGWDGLLAPILNSKPPDCDPNKVNPGSSVKGDCGNPSVGIFFFVSYIIISFLVVVNMYIAVILENFSVATEESAEPLSEDDFEMFYEVWEKFDPDATQFMEFEKLSQFAAALEPPLNLPQPNKLQLIAMDLPMVSGDRIHCLDILFAFTKRVLGESGEMDALRIQMEERFMASNPSKVSYQPITTTLKRKQEEVSAVIIQRAYRRHLLKRTVKQASFTYNKNKIKGGANLLIKEDMIIDRINENSITEKTDLTMSTAACPPSYDRVTKPIVEKHEQEGKDEKAKGK

SEQ ID NO: 51 - protein, 2009 aa, Homo sapiens
MEQTVLVPPGPDSFNFFTRESLAAIERRIAEEKAKNPKPDKKDDDENGPKPNSDLEAGKNLPFIYGDIPPEMVSEPLEDLDPYYINKKTFIVLNKLKAIFRFSATSALYILTPFNPLRKIAIKILVHSLFSMLIMCTILTNCVFMTMSNPPDWTKNVEYTFTGIYTFESLIKIIARGFCLEDFTFLRDPWNWLDFTVITFAYVTEFVDLGNVSALRTFRVLRALKTISVIPGLKTIVGALIQSVKKLSDVMILTVFCLSVFALIGLQLFMGNLRNKCIQWPPTNASLEEHSIEKNITVNYNGTLINETVFEFDWKSYIQDSRYHYFLEGFLDALLCGNSSDAGQCPEGYMCVKAGRNPNYGYTSFDTFSWAFLSLFRLMTQDFWENLYQLTLRAAGKTYMIFFVLVIFLGSFYLINLILAVVAMAYEEQNQATLEEAEQKEAEFQQMIEQLKKQQEAAQQAATATASEHSREPSAAGRLSDSSSEASKLSSKSAKERRNRRKKRKQKEQSGGEEKDEDEFQKSESEDSIRRKGFRFSIEGNRLTYEKRYSSPHQSLLSIRGSLFSPRRNSRTSLFSFRGRAKDVGSENDFADDEHSTFEDNESRRDSLFVPRRHGERRNSNLSQTSRSSRMLAVFPANGKMHSTVDCNGVVSLVGGPSVPTSPVGQLLPEVIIDKPATDDNGTTTETEMRKRRSSSFHVSMDFLEDPSQRQRAMSIASILTNTVEELEESRQKCPPCWYKFSNIFLIWDCSPYWLKVKHVVNLVVMDPFVDLAITICIVLNTLFMAMEHYPMTDHFNNVLTVGNLVFTGIFTAEMFLKIIAMDPYYYFQEGWNIFDGFIVTLSLVELGLANVEGLSVLRSFRLLRVFKLAKSWPTLNMLIKIIGNSVGALGNLTLVLAIIVFIFAVVGMQLFGKSYKDCVCKIASDCQLPRWHMNDFFHSFLIVFRVLCGEWIETMWDCMEVAGQAMCLTVFMMVMVIGNLVVLNLFLALLLSSFSADNLAATDDDNEMNNLQIAVDRMHKGVAYVKRKIYEFIQQSFIRKQKILDEIKPLDDLNNKKDSCMSNHTTEIGKDLDYLKDVNGTTSGIGTGSSVEKYIIDESDYMSFINNPSLTVTVPIAVGESDFENLNTEDFSSESDLEESKEKLNESSSSSEGSTVDIGAPVEEQPVVEPEETLEPEACFTEGCVQRFKCCQINVEEGRGKQWWNLRRTCFRIVEHNWFETFIVFMILLSSGALAFEDIYIDQRKTIKTMLEYADKVFTYIFILEMLLKWVAYGYQTYFTNAWCWLDFLIVDVSLVSLTANALGYSELGAIKSLRTLRALRPLRALSRFEGMRVVVNALLGAIPSIMNVLLVCLIFWLIFSIMGVNLFAGKFYHCINTTTGDRFDIEDVNNHTDCLKLIERNETARWKNVKVNFDNVGFGYLSLLQVATFKGWMDIMYAAVDSRNVELQPKYEKSLYMYLYFVIFIIFGSFFTLNLFIGVIIDNFNQQKKKFGGQDIFMTEEQKKYYNAMKKLGSKKPQKPIPRPGNKFQGMVFDFVTRQVFDISIMILICLNMVTMMVETDDQSEYVTTILSRINLVFIVLFTGECVLKLISLRHYYFTIGWNIFDFVVVILSIVGMFLAELIEKYFVSPTLFRVIRLARIGRILRLIKGAKGIRTLLFALMMSLPALFNIGLLLFLVMFIYAIFGMSNFAYVKREVGIDDMFNFETFGNSMICLFQITTSAGRDGLLAPILNSKPPDCDPNKVNPGSSVKGDCGNPSVGIFFFVSYIIISFLVVVNMYIAVILENFSVATEESAEPLSEDDFEMFYEVWEKFDPDATQFMEFEKLSQFAAALEPPLNLPQPNKLQLIAMDLPMVSGDRIHCLDILFAFTKRVLGESGEMDALRIQMEERFMASNPSKVSYQPITTTLKRKQEEVSAVIIQRAYRRHLLKRTVKQASFTYNKNKIKGGANLLIKEDMIIDRINENSITEKTDLTMSTAACPPSYDRVTKPIVEKHEQEGKDEKAKGK

SEQ ID NO: 52 - protein, 2009 aa, Homo sapiens
MEQTVLVPPGPDSFNFFTRESLAAIERRIAEEKAKNPKPDKKDDDENGPKPNSDLEAGKNLPFIYGDIPPEMVSEPLEDLDPYYINKKTFIVLNKLKAIFRFSATSALYILTPFNPLRKIAIKILVHSLFSMLIMCTILTNCVFMTMSNPPDWTKNVEYTFTGIYTFESLIKIIARGFCLEDFTFLRDPWNWLDFTVITFAYVTEFVDLGNVSALRTFRVLRALKTISVIPGLKTIVGALIQSVKKLSDVMILTVFCLSVFALIGLQLFMGNLRNKCIQWPPTNASLEEHSIEKNITVNYNGTLINETVFEFDWKSYIQDSRYHYFLEGFLDALLCGNSSDAGQCPEGYMCVKAGRNPNYGYTSFDTFSWAFLSLFRLMTQDFWENLYQLTLRAAGKTYMIFFVLVIFLGSFYLINLILAVVAMAYEEQNQATLEEAEQKEAEFQQMIEQLKKQQEAAQQAATATASEHSREPSAAGRLSDSSSEASKLSSKSAKERRNRRKKRKQKEQSGGEEKDEDEFQKSESEDSIRRKGFRFSIEGNRLTYEKRYSSPHQSLLSIRGSLFSPRRNSRTSLFSFRGRAKDVGSENDFADDEHSTFEDNESRRDSLFVPRRHGERRNSNLSQTSRSSRMLAVFPANGKMHSTVDCNGVVSLVGGPSVPTSPVGQLLPEVIIDKPATDDNGTTTETEMRKRRSSSFHVSMDFLEDPSQRQRAMSIASILTNTVEELEESRQKCPPCWYKFSNIFLIWDCSPYWLKVKHVVNLVVMDPFVDLAITICIVLNTLFMAMEHYPMTDHFNNVLTVGNLVFTGIFTAEMFLKIIAMDPYYYFQEGWNIFDGFIVTLSLVELGLANVEGLSVLRSFRLLRVFKLAKSWPTLNMLIKIIGNSVGALGNLTLVLAIIVFIFAVVGMQLFGKSYKDCVCKIASDCQLPRWHMNDFFHSFLIVFRVLCGEWIETMWDCMEVAGQAMCLTVFMMVMVIGNLVVLNLFLALLLSSFSADNLAATDDDNEMNNLQIAVDRMHKGVAYVKRKIYEFIQQSFIRKQKILDEIKPLDDLNNKKDSCMSNHTTEIGKDLDYLKDVNGTTSGIGTGSSVEKYIIDESDYMSFINNPSLTVTVPIAVGESDFENLNTEDFSSESDLEESKEKLNESSSSSEGSTVDIGAPVEEQPVVEPEETLEPEACFTEGCVQRFKCCQINVEEGRGKQWWNLRRTCFRIVEHNWFETFIVFMILLSSGALAFEDIYIDQRKTIKTMLEYADKVFTYIFILEMLLKWVAYGYQTYFTNAWCWLDFLIVDVSLVSLTANALGYSELGAIKSLRTLRALRPLRALSRFEGMRVVVNALLGAIPSIMNVLLVCLIFWLIFSIMGVNLFAGKFYHCINTTTGDRFDIEDVNNHTDCLKLIERNETARWKNVKVNFDNVGFGYLSLLQVATFKGWMDIMYAAVDSRNVELQPKYEKSLYMYLYFVIFIIFGSFFTLNLFIGVIIDNFNQQKKKFGGQDIFMTEEQKKYYNAMKKLGSKKPQKPIPRPGNKFQGMVFDFVTRQVFDISIMILICLNMVTMMVETDDQSEYVTTILSRINLVFIVLFTGECVLKLISLRHYYFTIGWNIFDFVVVILSIVGMFLAELIEKYFVSPTLFRVIRLARIGRILRLIKGAKGIRTLLFALMMSLPALFNIGLLLFLVMFIYAIFGMSNFAYVKREVGIDDMFNFETFGNSMICLFQITTSAGWDGLLAPILNSKPPDCDPNKVNPGSSVKGDCGNPSVGIFFFVSYIIISFLVVVNMYIAVILENFSVATEESAEPLSEDDFEMFYEVWEKFDPDATQFMEFEKLSQFAAALEPPLNLPQPNKLQLIAMDLPMVSGDRIHCLDILFAFTKRVLGESGEMDALRIQMEERFMASNPSKVSYQPITTTLKRKQEEVSAVITQRAYRRHLLKRTVKQASFTYNKNKIKGGANLLIKEDMIIDRINENSITEKTDLTMSTAACPPSYDRVTKPIVEKHEQEGKDEKAKGK

SEQ ID NO: 53 - protein, 383 aa, Homo sapiens
MEQTVLVPPGPDSFNFFTRESLAAIERRIAEEKAKNPKPDKKDDDENGPKPNSDLEAGKNLPFIYGDIPPEMVSEPLEDLDPYYINKKTFIVLNKLKAIFRFSATSALYILTPFNPLRKIAIKILVHSLFSMLIMCTILTNCVFMTMSNPPDWTKNVEYTFTGIYTFESLIKIIARGFCLEDFTFLRDPWNWLDFTVITFAYVTEFVDLGNVSALRTFRVLRALKTISVIPGLKTIVGALIQSVKKLSDVMILTVFCLSVFALIGLQLFMGNLRNKCIQWPPTNASLEEHSIEKNITVNYNGTLINETVFEFDWKSYIQDSRYHYFLEGFLDALLCGNSSDAGQCPEGYMCVKAGRNPNYGYTSFDTFSWAFLSLFRLMTQDF

SEQ ID NO: 54 - protein, 398 aa, Homo sapiens
MEQTVLVPPGPDSFNFFTRESLAAIERRIAEEKAKNPKPDKKDDDENGPKPNSDLEAGKNLPFIYGDIPPEMVSEPLEDLDPYYINKKTFIVLNKLKAIFRFSATSALYILTPFNPLRKIAIKILVHSLFSMLIMCTILTNCVFMTMSNPPDWTKNVEYTFTGIYTFESLIKIIARGFCLEDFTFLRDPWNWLDFTVITFAYVTEFVDLGNVSALRTFRVLRALKTISVIPGLKTIVGALIQSVKKLSDVMILTVFCLSVFALIGLQLFMGNLRNKCIQWPPTNASLEEHSIEKNITVNYNGTLINETVFEFDWKSYIQDSRYHYFLEGFLDALLCGNSSDAGQCPEGYMCVKAGRNPNYGYTSFDTFSWAFLSLFRLMTQDFWENLYQLTLRAAGKT

SEQ ID NO: 55 - protein, 964 aa, Homo sapiens
MEQTVLVPPGPDSFNFFTRESLAAIERRIAEEKAKNPKPDKKDDDENGPKPNSDLEAGKNLPFIYGDIPPEMVSEPLEDLDPYYINKKTFIVLNKLKAIFRFSATSALYILTPFNPLRKIAIKILVHSLFSMLIMCTILTNCVFMTMSNPPDWTKNVEYTFTGIYTFESLIKIIARGFCLEDFTFLRDPWNWLDFTVITFAYVTEFVDLGNVSALRTFRVLRALKTISVIPGLKTIVGALIQSVKKLSDVMILTVFCLSVFALIGLQLFMGNLRNKCIQWPPTNASLEEHSIEKNITVNYNGTLINETVFEFDWKSYIQDSRYHYFLEGFLDALLCGNSSDAGQCPEGYMCVKAGRNPNYGYTSFDTFSWAFLSLFRLMTQDFWENLYQLTLRAAGKTYMIFFVLVIFLGSFYLINLILAVVAMAYEEQNQATLEEAEQKEAEFQQMIEQLKKQQEAAQQAATATASEHSREPSAAGRLSDSSSEASKLSSKSAKERRNRRKKRKQKEQSGGEEKDEDEFQKSESEDSIRRKGFRFSIEGNRLTYEKRYSSPHQSLLSIRGSLFSPRRNSRTSLFSFRGRAKDVGSENDFADDEHSTFEDNESRRDSLFVPRRHGERRNSNLSQTSRSSRMLAVFPANGKMHSTVDCNGVVSLVGGPSVPTSPVGQLLPEVIIDKPATDDNGTTTETEMRKRRSSSFHVSMDFLEDPSQRQRAMSIASILTNTVEELEESRQKCPPCWYKFSNIFLIWDCSPYWLKVKHVVNLVVMDPFVDLAITICIVLNTLFMAMEHYPMTDHFNNVLTVGNLVFTGIFTAEMFLKIIAMDPYYYFQEGWNIFDGFIVTLSLVELGLANVEGLSVLRSFRLLRVFKLAKSWPTLNMLIKIIGNSVGALGNLTLVLAIIVFIFAVVGMQLFGKSYKDCVCKIASDCQLPRWHMNDFFHSFLIVFRVLCGEWIETMWDCMEVAG

SEQ ID NO: 56 - protein, 1524 aa, Homo sapiens
MEQTVLVPPGPDSFNFFTRESLAAIERRIAEEKAKNPKPDKKDDDENGPKPNSDLEAGKNLPFIYGDIPPEMVSEPLEDLDPYYINKKTFIVLNKLKAIFRFSATSALYILTPFNPLRKIAIKILVHSLFSMLIMCTILTNCVFMTMSNPPDWTKNVEYTFTGIYTFESLIKIIARGFCLEDFTFLRDPWNWLDFTVITFAYVTEFVDLGNVSALRTFRVLRALKTISVIPGLKTIVGALIQSVKKLSDVMILTVFCLSVFALIGLQLFMGNLRNKCIQWPPTNASLEEHSIEKNITVNYNGTLINETVFEFDWKSYIQDSRYHYFLEGFLDALLCGNSSDAGQCPEGYMCVKAGRNPNYGYTSFDTFSWAFLSLFRLMTQDFWENLYQLTLRAAGKTYMIFFVLVIFLGSFYLINLILAVVAMAYEEQNQATLEEAEQKEAEFQQMIEQLKKQQEAAQQAATATASEHSREPSAAGRLSDSSSEASKLSSKSAKERRNRRKKRKQKEQSGGEEKDEDEFQKSESEDSIRRKGFRFSIEGNRLTYEKRYSSPHQSLLSIRGSLFSPRRNSRTSLFSFRGRAKDVGSENDFADDEHSTFEDNESRRDSLFVPRRHGERRNSNLSQTSRSSRMLAVFPANGKMHSTVDCNGVVSLVGGPSVPTSPVGQLLPEVIIDKPATDDNGTTTETEMRKRRSSSFHVSMDFLEDPSQRQRAMSIASILTNTVEELEESRQKCPPCWYKFSNIFLIWDCSPYWLKVKHVVNLVVMDPFVDLAITICIVLNTLFMAMEHYPMTDHFNNVLTVGNLVFTGIFTAEMFLKIIAMDPYYYFQEGWNIFDGFIVTLSLVELGLANVEGLSVLRSFRLLRVFKLAKSWPTLNMLIKIIGNSVGALGNLTLVLAIIVFIFAVVGMQLFGKSYKDCVCKIASDCQLPRWHMNDFFHSFLIVFRVLCGEWIETMWDCMEVAGQAMCLTVFMMVMVIGNLVVLNLFLALLLSSFSADNLAATDDDNEMNNLQIAVDRMHKGVAYVKRKIYEFIQQSFIRKQKILDEIKPLDDLNNKKDSCMSNHTTEIGKDLDYLKDVNGTTSGIGTGSSVEKYIIDESDYMSFINNPSLTVTVPIAVGESDFENLNTEDFSSESDLEESKEKLNESSSSSEGSTVDIGAPVEEQPVVEPEETLEPEACFTEGCVQRFKCCQINVEEGRGKQWWNLRRTCFRIVEHNWFETFIVFMILLSSGALAFEDIYIDQRKTIKTMLEYADKVFTYIFILEMLLKWVAYGYQTYFTNAWCWLDFLIVDVSLVSLTANALGYSELGAIKSLRTLRALRPLRALSRFEGMRVVVNALLGAIPSIMNVLLVCLIFWLIFSIMGVNLFAGKFYHCINTTTGDRFDIEDVNNHTDCLKLIERNETARWKNVKVNFDNVGFGYLSLLQVATFKGWMDIMYAAVDSRNVELQPKYEKSLYMYLYFVIFIIFGSFFTLNLFIGVIIDNFNQQKKKFGGQDIFMTEEQKKYYNAMKKLGSKKPQKPIP

SEQ ID NO: 57 - protein, 1597 aa, Homo sapiens
MEQTVLVPPGPDSFNFFTRESLAAIERRIAEEKAKNPKPDKKDDDENGPKPNSDLEAGKNLPFIYGDIPPEMVSEPLEDLDPYYINKKTFIVLNKLKAIFRFSATSALYILTPFNPLRKIAIKILVHSLFSMLIMCTILTNCVFMTMSNPPDWTKNVEYTFTGIYTFESLIKIIARGFCLEDFTFLRDPWNWLDFTVITFAYVTEFVDLGNVSALRTFRVLRALKTISVIPGLKTIVGALIQSVKKLSDVMILTVFCLSVFALIGLQLFMGNLRNKCIQWPPTNASLEEHSIEKNITVNYNGTLINETVFEFDWKSYIQDSRYHYFLEGFLDALLCGNSSDAGQCPEGYMCVKAGRNPNYGYTSFDTFSWAFLSLFRLMTQDFWENLYQLTLRAAGKTYMIFFVLVIFLGSFYLINLILAVVAMAYEEQNQATLEEAEQKEAEFQQMIEQLKKQQEAAQQAATATASEHSREPSAAGRLSDSSSEASKLSSKSAKERRNRRKKRKQKEQSGGEEKDEDEFQKSESEDSIRRKGFRFSIEGNRLTYEKRYSSPHQSLLSIRGSLFSPRRNSRTSLFSFRGRAKDVGSENDFADDEHSTFEDNESRRDSLFVPRRHGERRNSNLSQTSRSSRMLAVFPANGKMHSTVDCNGVVSLVGGPSVPTSPVGQLLPEVIIDKPATDDNGTTTETEMRKRRSSSFHVSMDFLEDPSQRQRAMSIASILTNTVEELEESRQKCPPCWYKFSNIFLIWDCSPYWLKVKHVVNLVVMDPFVDLAITICIVLNTLFMAMEHYPMTDHFNNVLTVGNLVFTGIFTAEMFLKIIAMDPYYYFQEGWNIFDGFIVTLSLVELGLANVEGLSVLRSFRLLRVFKLAKSWPTLNMLIKIIGNSVGALGNLTLVLAIIVFIFAVVGMQLFGKSYKDCVCKIASDCQLPRWHMNDFFHSFLIVFRVLCGEWIETMWDCMEVAGQAMCLTVFMMVMVIGNLVVLNLFLALLLSSFSADNLAATDDDNEMNNLQIAVDRMHKGVAYVKRKIYEFIQQSFIRKQKILDEIKPLDDLNNKKDSCMSNHTTEIGKDLDYLKDVNGTTSGIGTGSSVEKYIIDESDYMSFINNPSLTVTVPIAVGESDFENLNTEDFSSESDLEESKEKLNESSSSSEGSTVDIGAPVEEQPVVEPEETLEPEACFTEGCVQRFKCCQINVEEGRGKQWWNLRRTCFRIVEHNWFETFIVFMILLSSGALAFEDIYIDQRKTIKTMLEYADKVFTYIFILEMLLKWVAYGYQTYFTNAWCWLDFLIVDVSLVSLTANALGYSELGAIKSLRTLRALRPLRALSRFEGMRVVVNALLGAIPSIMNVLLVCLIFWLIFSIMGVNLFAGKFYHCINTTTGDRFDIEDVNNHTDCLKLIERNETARWKNVKVNFDNVGFGYLSLLQVATFKGWMDIMYAAVDSRNVELQPKYEKSLYMYLYFVIFIIFGSFFTLNLFIGVIIDNFNQQKKKFGGQDIFMTEEQKKYYNAMKKLGSKKPQKPIPRPGNKFQGMVFDFVTRQVFDISIMILICLNMVTMMVETDDQSEYVTTILSRINLVFIVLFTGECVLKLISLRH

SEQ ID NO: 58 - protein, 1811 aa, Homo sapiens
MEQTVLVPPGPDSFNFFTRESLAAIERRIAEEKAKNPKPDKKDDDENGPKPNSDLEAGKNLPFIYGDIPPEMVSEPLEDLDPYYINKKTFIVLNKLKAIFRFSATSALYILTPFNPLRKIAIKILVHSLFSMLIMCTILTNCVFMTMSNPPDWTKNVEYTFTGIYTFESLIKIIARGFCLEDFTFLRDPWNWLDFTVITFAYVTEFVDLGNVSALRTFRVLRALKTISVIPGLKTIVGALIQSVKKLSDVMILTVFCLSVFALIGLQLFMGNLRNKCIQWPPTNASLEEHSIEKNITVNYNGTLINETVFEFDWKSYIQDSRYHYFLEGFLDALLCGNSSDAGQCPEGYMCVKAGRNPNYGYTSFDTFSWAFLSLFRLMTQDFWENLYQLTLRAAGKTYMIFFVLVIFLGSFYLINLILAVVAMAYEEQNQATLEEAEQKEAEFQQMIEQLKKQQEAAQQAATATASEHSREPSAAGRLSDSSSEASKLSSKSAKERRNRRKKRKQKEQSGGEEKDEDEFQKSESEDSIRRKGFRFSIEGNRLTYEKRYSSPHQSLLSIRGSLFSPRRNSRTSLFSFRGRAKDVGSENDFADDEHSTFEDNESRRDSLFVPRRHGERRNSNLSQTSRSSRMLAVFPANGKMHSTVDCNGVVSLVGGPSVPTSPVGQLLPEVIIDKPATDDNGTTTETEMRKRRSSSFHVSMDFLEDPSQRQRAMSIASILTNTVEELEESRQKCPPCWYKFSNIFLIWDCSPYWLKVKHVVNLVVMDPFVDLAITICIVLNTLFMAMEHYPMTDHFNNVLTVGNLVFTGIFTAEMFLKIIAMDPYYYFQEGWNIFDGFIVTLSLVELGLANVEGLSVLRSFRLLRVFKLAKSWPTLNMLIKIIGNSVGALGNLTLVLAIIVFIFAVVGMQLFGKSYKDCVCKIASDCQLPRWHMNDFFHSFLIVFRVLCGEWIETMWDCMEVAGQAMCLTVFMMVMVIGNLVVLNLFLALLLSSFSADNLAATDDDNEMNNLQIAVDRMHKGVAYVKRKIYEFIQQSFIRKQKILDEIKPLDDLNNKKDSCMSNHTTEIGKDLDYLKDVNGTTSGIGTGSSVEKYIIDESDYMSFINNPSLTVTVPIAVGESDFENLNTEDFSSESDLEESKEKLNESSSSSEGSTVDIGAPVEEQPVVEPEETLEPEACFTEGCVQRFKCCQINVEEGRGKQWWNLRRTCFRIVEHNWFETFIVFMILLSSGALAFEDIYIDQRKTIKTMLEYADKVFTYIFILEMLLKWVAYGYQTYFTNAWCWLDFLIVDVSLVSLTANALGYSELGAIKSLRTLRALRPLRALSRFEGMRVVVNALLGAIPSIMNVLLVCLIFWLIFSIMGVNLFAGKFYHCINTTTGDRFDIEDVNNHTDCLKLIERNETARWKNVKVNFDNVGFGYLSLLQVATFKGWMDIMYAAVDSRNVELQPKYEKSLYMYLYFVIFIIFGSFFTLNLFIGVIIDNFNQQKKKFGGQDIFMTEEQKKYYNAMKKLGSKKPQKPIPRPGNKFQGMVFDFVTRQVFDISIMILICLNMVTMMVETDDQSEYVTTILSRINLVFIVLFTGECVLKLISLRHYYFTIGWNIFDFVVVILSIVGMFLAELIEKYFVSPTLFRVIRLARIGRILRLIKGAKGIRTLLFALMMSLPALFNIGLLLFLVMFIYAIFGMSNFAYVKREVGIDDMFNFETFGNSMICLFQITTSAGWDGLLAPILNSKPPDCDPNKVNPGSSVKGDCGNPSVGIFFFVSYIIISFLVVVNMYIAVILENFSVATEESAEPLSEDDFEMFYEV

SEQ ID NO: 59 - protein, 1885 aa, Homo sapiens
MEQTVLVPPGPDSFNFFTRESLAAIERRIAEEKAKNPKPDKKDDDENGPKPNSDLEAGKNLPFIYGDIPPEMVSEPLEDLDPYYINKKTFIVLNKLKAIFRFSATSALYILTPFNPLRKIAIKILVHSLFSMLIMCTILTNCVFMTMSNPPDWTKNVEYTFTGIYTFESLIKIIARGFCLEDFTFLRDPWNWLDFTVITFAYVTEFVDLGNVSALRTFRVLRALKTISVIPGLKTIVGALIQSVKKLSDVMILTVFCLSVFALIGLQLFMGNLRNKCIQWPPTNASLEEHSIEKNITVNYNGTLINETVFEFDWKSYIQDSRYHYFLEGFLDALLCGNSSDAGQCPEGYMCVKAGRNPNYGYTSFDTFSWAFLSLFRLMTQDFWENLYQLTLRAAGKTYMIFFVLVIFLGSFYLINLILAVVAMAYEEQNQATLEEAEQKEAEFQQMIEQLKKQQEAAQQAATATASEHSREPSAAGRLSDSSSEASKLSSKSAKERRNRRKKRKQKEQSGGEEKDEDEFQKSESEDSIRRKGFRFSIEGNRLTYEKRYSSPHQSLLSIRGSLFSPRRNSRTSLFSFRGRAKDVGSENDFADDEHSTFEDNESRRDSLFVPRRHGERRNSNLSQTSRSSRMLAVFPANGKMHSTVDCNGVVSLVGGPSVPTSPVGQLLPEVIIDKPATDDNGTTTETEMRKRRSSSFHVSMDFLEDPSQRQRAMSIASILTNTVEELEESRQKCPPCWYKFSNIFLIWDCSPYWLKVKHVVNLVVMDPFVDLAITICIVLNTLFMAMEHYPMTDHFNNVLTVGNLVFTGIFTAEMFLKIIAMDPYYYFQEGWNIFDGFIVTLSLVELGLANVEGLSVLRSFRLLRVFKLAKSWPTLNMLIKIIGNSVGALGNLTLVLAIIVFIFAVVGMQLFGKSYKDCVCKIASDCQLPRWHMNDFFHSFLIVFRVLCGEWIETMWDCMEVAGQAMCLTVFMMVMVIGNLVVLNLFLALLLSSFSADNLAATDDDNEMNNLQIAVDRMHKGVAYVKRKIYEFIQQSFIRKQKILDEIKPLDDLNNKKDSCMSNHTTEIGKDLDYLKDVNGTTSGIGTGSSVEKYIIDESDYMSFINNPSLTVTVPIAVGESDFENLNTEDFSSESDLEESKEKLNESSSSSEGSTVDIGAPVEEQPVVEPEETLEPEACFTEGCVQRFKCCQINVEEGRGKQWWNLRRTCFRIVEHNWFETFIVFMILLSSGALAFEDIYIDQRKTIKTMLEYADKVFTYIFILEMLLKWVAYGYQTYFTNAWCWLDFLIVDVSLVSLTANALGYSELGAIKSLRTLRALRPLRALSRFEGMRVVVNALLGAIPSIMNVLLVCLIFWLIFSIMGVNLFAGKFYHCINTTTGDRFDIEDVNNHTDCLKLIERNETARWKNVKVNFDNVGFGYLSLLQVATFKGWMDIMYAAVDSRNVELQPKYEKSLYMYLYFVIFIIFGSFFTLNLFIGVIIDNFNQQKKKFGGQDIFMTEEQKKYYNAMKKLGSKKPQKPIPRPGNKFQGMVFDFVTRQVFDISIMILICLNMVTMMVETDDQSEYVTTILSRINLVFIVLFTGECVLKLISLRHYYFTIGWNIFDFVVVILSIVGMFLAELIEKYFVSPTLFRVIRLARIGRILRLIKGAKGIRTLLFALMMSLPALFNIGLLLFLVMFIYAIFGMSNFAYVKREVGIDDMFNFETFGNSMICLFQITTSAGWDGLLAPILNSKPPDCDPNKVNPGSSVKGDCGNPSVGIFFFVSYIIISFLVVVNMYIAVILENFSVATEESAEPLSEDDFEMFYEVWEKFDPDATQFMEFEKLSQFAAALEPPLNLPQPNKLQLIAMDLPMVSGDRIHCLDILFAFTKRVLGESGEMDAL

SEQ ID NO: 60 - protein, 1903 aa, Homo sapiens
MEQTVLVPPGPDSFNFFTRESLAAIERRIAEEKAKNPKPDKKDDDENGPKPNSDLEAGKNLPFIYGDIPPEMVSEPLEDLDPYYINKKTFIVLNKLKAIFRFSATSALYILTPFNPLRKIAIKILVHSLFSMLIMCTILTNCVFMTMSNPPDWTKNVEYTFTGIYTFESLIKIIARGFCLEDFTFLRDPWNWLDFTVITFAYVTEFVDLGNVSALRTFRVLRALKTISVIPGLKTIVGALIQSVKKLSDVMILTVFCLSVFALIGLQLFMGNLRNKCIQWPPTNASLEEHSIEKNITVNYNGTLINETVFEFDWKSYIQDSRYHYFLEGFLDALLCGNSSDAGQCPEGYMCVKAGRNPNYGYTSFDTFSWAFLSLFRLMTQDFWENLYQLTLRAAGKTYMIFFVLVIFLGSFYLINLILAVVAMAYEEQNQATLEEAEQKEAEFQQMIEQLKKQQEAAQQAATATASEHSREPSAAGRLSDSSSEASKLSSKSAKERRNRRKKRKQKEQSGGEEKDEDEFQKSESEDSIRRKGFRFSIEGNRLTYEKRYSSPHQSLLSIRGSLFSPRRNSRTSLFSFRGRAKDVGSENDFADDEHSTFEDNESRRDSLFVPRRHGERRNSNLSQTSRSSRMLAVFPANGKMHSTVDCNGVVSLVGGPSVPTSPVGQLLPEVIIDKPATDDNGTTTETEMRKRRSSSFHVSMDFLEDPSQRQRAMSIASILTNTVEELEESRQKCPPCWYKFSNIFLIWDCSPYWLKVKHVVNLVVMDPFVDLAITICIVLNTLFMAMEHYPMTDHFNNVLTVGNLVFTGIFTAEMFLKIIAMDPYYYFQEGWNIFDGFIVTLSLVELGLANVEGLSVLRSFRLLRVFKLAKSWPTLNMLIKIIGNSVGALGNLTLVLAIIVFIFAVVGMQLFGKSYKDCVCKIASDCQLPRWHMNDFFHSFLIVFRVLCGEWIETMWDCMEVAGQAMCLTVFMMVMVIGNLVVLNLFLALLLSSFSADNLAATDDDNEMNNLQIAVDRMHKGVAYVKRKIYEFIQQSFIRKQKILDEIKPLDDLNNKKDSCMSNHTTEIGKDLDYLKDVNGTTSGIGTGSSVEKYIIDESDYMSFINNPSLTVTVPIAVGESDFENLNTEDFSSESDLEESKEKLNESSSSSEGSTVDIGAPVEEQPVVEPEETLEPEACFTEGCVQRFKCCQINVEEGRGKQWWNLRRTCFRIVEHNWFETFIVFMILLSSGALAFEDIYIDQRKTIKTMLEYADKVFTYIFILEMLLKWVAYGYQTYFTNAWCWLDFLIVDVSLVSLTANALGYSELGAIKSLRTLRALRPLRALSRFEGMRVVVNALLGAIPSIMNVLLVCLIFWLIFSIMGVNLFAGKFYHCINTTTGDRFDIEDVNNHTDCLKLIERNETARWKNVKVNFDNVGFGYLSLLQVATFKGWMDIMYAAVDSRNVELQPKYEKSLYMYLYFVIFIIFGSFFTLNLFIGVIIDNFNQQKKKFGGQDIFMTEEQKKYYNAMKKLGSKKPQKPIPRPGNKFQGMVFDFVTRQVFDISIMILICLNMVTMMVETDDQSEYVTTILSRINLVFIVLFTGECVLKLISLRHYYFTIGWNIFDFVVVILSIVGMFLAELIEKYFVSPTLFRVIRLARIGRILRLIKGAKGIRTLLFALMMSLPALFNIGLLLFLVMFIYAIFGMSNFAYVKREVGIDDMFNFETFGNSMICLFQITTSAGWDGLLAPILNSKPPDCDPNKVNPGSSVKGDCGNPSVGIFFFVSYIIISFLVVVNMYIAVILENFSVATEESAEPLSEDDFEMFYEVWEKFDPDATQFMEFEKLSQFAAALEPPLNLPQPNKLQLIAMDLPMVSGDRIHCLDILFAFTKRVLGESGEMDALRIQMEERFMASNPSKVSY

SEQ ID NO: 61 - protein, 354 aa, Homo sapiens
MEQTVLVPPGPDSFNFFTRESLAAIERRIAEEKAKNPKPDKKDDDENGPKPNSDLEAGKNLPFIYGDIPPEMVSEPLEDLDPYYINKKTFIVLNKLKAIFRFSATSALYILTPFNPLRKIAIKILVHSLFSMLIMCTILTNCVFMTMSNPPDWTKNVEYTFTGIYTFESLIKIIARGFCLEDFTFLRDPWNWLDFTVITFAYVTEFVDLGNVSALRTFRVLRALKTISVIPGLKTIVGALIQSVKKLSDVMILTVFCLSVFALIGLQLFMGNLRNKCIQWPPTNASLEEHSIEKNITVNYNGTLINETVFEFDWKSYIQDSRYHYFLEGFLDALLCGNSSDAGQCPEGYVCESW

SEQ ID NO: 62 - protein, 354 aa, Homo sapiens
MEQTVLVPPGPDSFNFFTRESLAAIERRIAEEKAKNPKPDKKDDDENGPKPNSDLEAGKNLPFIYGDIPPEMVSEPLEDLDPYYINKKTFIVLNKLKAIFRFSATSALYILTPFNPLRKIAIKILVHSLFSMLIMCTILTNCVFMTMSNPPDWTKNVEYTFTGIYTFESLIKIIARGFCLEDFTFLRDPWNWLDFTVITFAYVTEFVDLGNVSALRTFRVLRALKTISVIPGLKTIVGALIQSVKKLSDVMILTVFCLSVFALIGLQLFMGNLRNKCIQWPPTNASLEEHSIEKNITVNYNGTLINETVFEFDWKSYIQDSRYHYFLEGFLDALLCGNSSDAGQCPEGYMCESW

SEQ ID NO: 63 - protein, 568 aa, Homo sapiens
MEQTVLVPPGPDSFNFFTRESLAAIERRIAEEKAKNPKPDKKDDDENGPKPNSDLEAGKNLPFIYGDIPPEMVSEPLEDLDPYYINKKTFIVLNKLKAIFRFSATSALYILTPFNPLRKIAIKILVHSLFSMLIMCTILTNCVFMTMSNPPDWTKNVEYTFTGIYTFESLIKIIARGFCLEDFTFLRDPWNWLDFTVITFAYVTEFVDLGNVSALRTFRVLRALKTISVIPGLKTIVGALIQSVKKLSDVMILTVFCLSVFALIGLQLFMGNLRNKCIQWPPTNASLEEHSIEKNITVNYNGTLINETVFEFDWKSYIQDSRYHYFLEGFLDALLCGNSSDAGQCPEGYMCVKAGRNPNYGYTSFDTFSWAFLSLFRLMTQDFWENLYQLTLRAAGKTYMIFFVLVIFLGSFYLINLILAVVAMAYEEQNQATLEEAEQKEAEFQQMIEQLKKQQEAAQQAATATASEHSREPSAAGRLSDSSSEASKLSSKSAKERRNRRKKRKQKEQSGGEEKDEDEFQKSESEDSIRRKGFRFSIEGNRLTYEEVLLPTPVFVEHPWLPIFTKAK

SEQ ID NO: 64 - protein, 875 aa, Homo sapiens
MEQTVLVPPGPDSFNFFTRESLAAIERRIAEEKAKNPKPDKKDDDENGPKPNSDLEAGKNLPFIYGDIPPEMVSEPLEDLDPYYINKKTFIVLNKLKAIFRFSATSALYILTPFNPLRKIAIKILVHSLFSMLIMCTILTNCVFMTMSNPPDWTKNVEYTFTGIYTFESLIKIIARGFCLEDFTFLRDPWNWLDFTVITFAYVTEFVDLGNVSALRTFRVLRALKTISVIPGLKTIVGALIQSVKKLSDVMILTVFCLSVFALIGLQLFMGNLRNKCIQWPPTNASLEEHSIEKNITVNYNGTLINETVFEFDWKSYIQDSRYHYFLEGFLDALLCGNSSDAGQCPEGYMCVKAGRNPNYGYTSFDTFSWAFLSLFRLMTQDFWENLYQLTLRAAGKTYMIFFVLVIFLGSFYLINLILAVVAMAYEEQNQATLEEAEQKEAEFQQMIEQLKKQQEAAQQAATATASEHSREPSAAGRLSDSSSEASKLSSKSAKERRNRRKKRKQKEQSGGEEKDEDEFQKSESEDSIRRKGFRFSIEGNRLTYEKRYSSPHQSLLSIRGSLFSPRRNSRTSLFSFRGRAKDVGSENDFADDEHSTFEDNESRRDSLFVPRRHGERRNSNLSQTSRSSRMLAVFPANGKMHSTVDCNGVVSLVGGPSVPTSPVGQLLPEVIIDKPATDDNGTTTETEMRKRRSSSFHVSMDFLEDPSQRQRAMSIASILTNTVEELEESRQKCPPCWYKFSNIFLIWDCSPYWLKVKHVVNLVVMDPFVDLAITICIVLNTLFMAMEHYPMTDHFNNVLTVGNLVFTGIFTAEMFLKIIAMDPYYYFQEGWNIFDGFIVTLSLVELGLANVEGYLFSVHFDCCEFSSWQNLGQR

SEQ ID NO: 65 - protein, 1044 aa, Homo sapiens
MEQTVLVPPGPDSFNFFTRESLAAIERRIAEEKAKNPKPDKKDDDENGPKPNSDLEAGKNLPFIYGDIPPEMVSEPLEDLDPYYINKKTFIVLNKLKAIFRFSATSALYILTPFNPLRKIAIKILVHSLFSMLIMCTILTNCVFMTMSNPPDWTKNVEYTFTGIYTFESLIKIIARGFCLEDFTFLRDPWNWLDFTVITFAYVTEFVDLGNVSALRTFRVLRALKTISVIPGLKTIVGALIQSVKKLSDVMILTVFCLSVFALIGLQLFMGNLRNKCIQWPPTNASLEEHSIEKNITVNYNGTLINETVFEFDWKSYIQDSRYHYFLEGFLDALLCGNSSDAGQCPEGYMCVKAGRNPNYGYTSFDTFSWAFLSLFRLMTQDFWENLYQLTLRAAGKTYMIFFVLVIFLGSFYLINLILAVVAMAYEEQNQATLEEAEQKEAEFQQMIEQLKKQQEAAQQAATATASEHSREPSAAGRLSDSSSEASKLSSKSAKERRNRRKKRKQKEQSGGEEKDEDEFQKSESEDSIRRKGFRFSIEGNRLTYEKRYSSPHQSLLSIRGSLFSPRRNSRTSLFSFRGRAKDVGSENDFADDEHSTFEDNESRRDSLFVPRRHGERRNSNLSQTSRSSRMLAVFPANGKMHSTVDCNGVVSLVGGPSVPTSPVGQLLPEVIIDKPATDDNGTTTETEMRKRRSSSFHVSMDFLEDPSQRQRAMSIASILTNTVEELEESRQKCPPCWYKFSNIFLIWDCSPYWLKVKHVVNLVVMDPFVDLAITICIVLNTLFMAMEHYPMTDHFNNVLTVGNLVFTGIFTAEMFLKIIAMDPYYYFQEGWNIFDGFIVTLSLVELGLANVEGLSVLRSFRLLRVFKLAKSWPTLNMLIKIIGNSVGALGNLTLVLAIIVFIFAVVGMQLFGKSYKDCVCKIASDCQLPRWHMNDFFHSFLIVFRVLCGEWIETMWDCMEVAGQAMCLTVFMMVMVIGNLVVLNLFLALLLSSFSADNLAATDDDNEMNNLQIAVDRMHKGVAYVKRKIYDLFNSPSLGNKRF

SEQ ID NO: 66 - protein, 1162 aa, Homo sapiens
MEQTVLVPPGPDSFNFFTRESLAAIERRIAEEKAKNPKPDKKDDDENGPKPNSDLEAGKNLPFIYGDIPPEMVSEPLEDLDPYYINKKTFIVLNKLKAIFRFSATSALYILTPFNPLRKIAIKILVHSLFSMLIMCTILTNCVFMTMSNPPDWTKNVEYTFTGIYTFESLIKIIARGFCLEDFTFLRDPWNWLDFTVITFAYVTEFVDLGNVSALRTFRVLRALKTISVIPGLKTIVGALIQSVKKLSDVMILTVFCLSVFALIGLQLFMGNLRNKCIQWPPTNASLEEHSIEKNITVNYNGTLINETVFEFDWKSYIQDSRYHYFLEGFLDALLCGNSSDAGQCPEGYMCVKAGRNPNYGYTSFDTFSWAFLSLFRLMTQDFWENLYQLTLRAAGKTYMIFFVLVIFLGSFYLINLILAVVAMAYEEQNQATLEEAEQKEAEFQQMIEQLKKQQEAAQQAATATASEHSREPSAAGRLSDSSSEASKLSSKSAKERRNRRKKRKQKEQSGGEEKDEDEFQKSESEDSIRRKGFRFSIEGNRLTYEKRYSSPHQSLLSIRGSLFSPRRNSRTSLFSFRGRAKDVGSENDFADDEHSTFEDNESRRDSLFVPRRHGERRNSNLSQTSRSSRMLAVFPANGKMHSTVDCNGVVSLVGGPSVPTSPVGQLLPEVIIDKPATDDNGTTTETEMRKRRSSSFHVSMDFLEDPSQRQRAMSIASILTNTVEELEESRQKCPPCWYKFSNIFLIWDCSPYWLKVKHVVNLVVMDPFVDLAITICIVLNTLFMAMEHYPMTDHFNNVLTVGNLVFTGIFTAEMFLKIIAMDPYYYFQEGWNIFDGFIVTLSLVELGLANVEGLSVLRSFRLLRVFKLAKSWPTLNMLIKIIGNSVGALGNLTLVLAIIVFIFAVVGMQLFGKSYKDCVCKIASDCQLPRWHMNDFFHSFLIVFRVLCGEWIETMWDCMEVAGQAMCLTVFMMVMVIGNLVVLNLFLALLLSSFSADNLAATDDDNEMNNLQIAVDRMHKGVAYVKRKIYEFIQQSFIRKQKILDEIKPLDDLNNKKDSCMSNHTTEIGKDLDYLKDVNGTTSGIGTGSSVEKYIIDESDYMSFINNPSLTVTVPIAVGESDFENLNTEDFSSESDLEESKEKLNESSSSSEGALWTSAHL

SEQ ID NO: 67 - protein, 1671 aa, Homo sapiens
MEQTVLVPPGPDSFNFFTRESLAAIERRIAEEKAKNPKPDKKDDDENGPKPNSDLEAGKNLPFIYGDIPPEMVSEPLEDLDPYYINKKTFIVLNKLKAIFRFSATSALYILTPFNPLRKIAIKILVHSLFSMLIMCTILTNCVFMTMSNPPDWTKNVEYTFTGIYTFESLIKIIARGFCLEDFTFLRDPWNWLDFTVITFAYVTEFVDLGNVSALRTFRVLRALKTISVIPGLKTIVGALIQSVKKLSDVMILTVFCLSVFALIGLQLFMGNLRNKCIQWPPTNASLEEHSIEKNITVNYNGTLINETVFEFDWKSYIQDSRYHYFLEGFLDALLCGNSSDAGQCPEGYMCVKAGRNPNYGYTSFDTFSWAFLSLFRLMTQDFWENLYQLTLRAAGKTYMIFFVLVIFLGSFYLINLILAVVAMAYEEQNQATLEEAEQKEAEFQQMIEQLKKQQEAAQQAATATASEHSREPSAAGRLSDSSSEASKLSSKSAKERRNRRKKRKQKEQSGGEEKDEDEFQKSESEDSIRRKGFRFSIEGNRLTYEKRYSSPHQSLLSIRGSLFSPRRNSRTSLFSFRGRAKDVGSENDFADDEHSTFEDNESRRDSLFVPRRHGERRNSNLSQTSRSSRMLAVFPANGKMHSTVDCNGVVSLVGGPSVPTSPVGQLLPEVIIDKPATDDNGTTTETEMRKRRSSSFHVSMDFLEDPSQRQRAMSIASILTNTVEELEESRQKCPPCWYKFSNIFLIWDCSPYWLKVKHVVNLVVMDPFVDLAITICIVLNTLFMAMEHYPMTDHFNNVLTVGNLVFTGIFTAEMFLKIIAMDPYYYFQEGWNIFDGFIVTLSLVELGLANVEGLSVLRSFRLLRVFKLAKSWPTLNMLIKIIGNSVGALGNLTLVLAIIVFIFAVVGMQLFGKSYKDCVCKIASDCQLPRWHMNDFFHSFLIVFRVLCGEWIETMWDCMEVAGQAMCLTVFMMVMVIGNLVVLNLFLALLLSSFSADNLAATDDDNEMNNLQIAVDRMHKGVAYVKRKIYEFIQQSFIRKQKILDEIKPLDDLNNKKDSCMSNHTTEIGKDLDYLKDVNGTTSGIGTGSSVEKYIIDESDYMSFINNPSLTVTVPIAVGESDFENLNTEDFSSESDLEESKEKLNESSSSSEGSTVDIGAPVEEQPVVEPEETLEPEACFTEGCVQRFKCCQINVEEGRGKQWWNLRRTCFRIVEHNWFETFIVFMILLSSGALAFEDIYIDQRKTIKTMLEYADKVFTYIFILEMLLKWVAYGYQTYFTNAWCWLDFLIVDVSLVSLTANALGYSELGAIKSLRTLRALRPLRALSRFEGMRVVVNALLGAIPSIMNVLLVCLIFWLIFSIMGVNLFAGKFYHCINTTTGDRFDIEDVNNHTDCLKLIERNETARWKNVKVNFDNVGFGYLSLLQVATFKGWMDIMYAAVDSRNVELQPKYEKSLYMYLYFVIFIIFGSFFTLNLFIGVIIDNFNQQKKKFGGQDIFMTEEQKKYYNAMKKLGSKKPQKPIPRPGNKFQGMVFDFVTRQVFDISIMILICLNMVTMMVETDDQSEYVTTILSRINLVFIVLFTGECVLKLISLRHYYFTIGWNIFDFVVVILSIVGMFLAELIEKYFVSPTLFRVIRLARIGRILRLIQRSKGDPHAALCFDDVPSCVV

SEQ ID NO: 68 - protein, 2009 aa, Homo sapiens
MEQTVLVPPGPDSFNFFTRESLAAIERRIAEEKAKNPKPDKKDDDENGPKPNSDLEAGKNLPFIYGDIPPEMVSEPLEDLDPYYINKKTFIVLNKLKAIFRFSATSALYILTPFNPLRKIAIKILVHSLFSMLIMCTILTNCVFMTMSNPPDWTKNVEYTFTGIYTFESLIKIIARGFCLEDFTFLRDPWNWLDFTVITFAYVTEFVDLGNVSALRTFRVLRALKTISVIPGLKTIVGALIQSVKKLSDVMILTVFCLSVFALIGLQLFMGNLRNKCIQWPPTNASLEEHSIEKNITVNYNGTLINETVFEFDWKSYIQDSRYHYFLEGFLDALLCGNSSDAGQCPEGYMCVKAGRNPNYGYTSFDTFSWAFLSLFRLMTQDFWENLYQLTLRAAGKTYMIFFVLVIFLGSFYLINLILAVVAMAYEEQNQATLEEAEQKEAEFQQMIEQLKKQQEAAQQAATATASEHSREPSAAGRLSDSSSEASKLSSKSAKERRNRRKKRKQKEQSGGEEKDEDEFQKSESEDSIRRKGFRFSIEGNRLTYEKRYSSPHQSLLSIRGSLFSPRRNSRTSLFSFRGRAKDVGSENDFADDEHSTFEDNESRRDSLFVPRRHGERRNSNLSQTGRSSRMLAVFPANGKMHSTVDCNGVVSLVGGPSVPTSPVGQLLPEVIIDKPATDDNGTTTETEMRKRRSSSFHVSMDFLEDPSQRQRAMSIASILTNTVEELEESRQKCPPCWYKFSNIFLIWDCSPYWLKVKHVVNLVVMDPFVDLAITICIVLNTLFMAMEHYPMTDHFNNVLTVGNLVFTGIFTAEMFLKIIAMDPYYYFQEGWNIFDGFIVTLSLVELGLANVEGLSVLRSFRLLRVFKLAKSWPTLNMLIKIIGNSVGALGNLTLVLAIIVFIFAVVGMQLFGKSYKDCVCKIASDCQLPRWHMNDFFHSFLIVFRVLCGEWIETMWDCMEVAGQAMCLTVFMMVMVIGNLVVLNLFLALLLSSFSADNLAATDDDNEMNNLQIAVDRMHKGVAYVKRKIYEFIQQSFIRKQKILDEIKPLDDLNNKKDSCMSNHTTEIGKDLDYLKDVNGTTSGIGTGSSVEKYIIDESDYMSFINNPSLTVTVPIAVGESDFENLNTEDFSSESDLEESKEKLNESSSSSEGSTVDIGAPVEEQPVVEPEETLEPEACFTEGCVQRFKCCQINVEEGRGKQWWNLRRTCFRIVEHNWFETFIVFMILLSSGALAFEDIYIDQRKTIKTMLEYADKVFTYIFILEMLLKWVAYGYQTYFTNAWCWLDFLIVDVSLVSLTANALGYSELGAIKSLRTLRALRPLRALSRFEGMRVVVNALLGAIPSIMNVLLVCLIFWLIFSIMGVNLFAGKFYHCINTTTGDRFDIEDVNNHTDCLKLIERNETARWKNVKVNFDNVGFGYLSLLQVATFKGWMDIMYAAVDSRNVELQPKYEKSLYMYLYFVIFIIFGSFFTLNLFIGVIIDNFNQQKKKFGGQDIFMTEEQKKYYNAMKKLGSKKPQKPIPRPGNKFQGMVFDFVTRQVFDISIMILICLNMVTMMVETDDQSEYVTTILSRINLVFIVLFTGECVLKLISLRHYYFTIGWNIFDFVVVILSIVGMFLAELIEKYFVSPTLFRVIRLARIGRILRLIKGAKGIRTLLFALMMSLPALFNIGLLLFLVMFIYAIFGMSNFAYVKREVGIDDMFNFETFGNSMICLFQITTSAGWDGLLAPILNSKPPDCDPNKVNPGSSVKGDCGNPSVGIFFFVSYIIISFLVVVNMYIAVILENFSVATEESAEPLSEDDFEMFYEVWEKFDPDATQFMEFEKLSQFAAALEPPLNLPQPNKLQLIAMDLPMVSGDRIHCLDILFAFTKRVLGESGEMDALRIQMEERFMASNPSKVSYQPITTTLKRKQEEVSAVIIQRAYRRHLLKRTVKQASFTYNKNKIKGGANLLIKEDMIIDRINENSITEKTDLTMSTAACPPSYDRVTKPIVEKHEQEGKDEKAKGK

SEQ ID NO: 69 - protein, 2009 aa, Homo sapiens
MEQTVLVPPGPDSFNFFTRESLAAIERRIAEEKAKNPKPDKKDDDENGPKPNSDLEAGKNLPFIYGDIPPEMVSEPLEDLDPYYINKKTFIVLNKLKAIFRFSATSALYILTPFNPLRKIAIKILVHSLFSMLIMCTILTNCVFMTMSNPPDWTKNVEYTFTGIYTFESLIKIIARGFCLEDFTFLRDPWNWLDFTVITFAYVTEFVDLGNVSALRTFRVLRALKTISVIPGLKTIVGALIQSVKKLSDVMILTVFCLSVFALIGLQLFMGNLRNKCIQWPPTNASLEEHSIEKNITVNYNGTLINETVFEFDWKSYIQDSRYHYFLEGFLDALLCGNSSDAGQCPEGYMCVKAGRNPNYGYTSFDTFSWAFLSLFRLMTQDFWENLYQLTLRAAGKTYMIFFVLVIFLGSFYLINLILAVVAMAYEEQNQATLEEAEQKEAEFQQMIEQLKKQQEAAQQAATATASEHSREPSAAGRLSDSSSEASKLSSKSAKERRNRRKKRKQKEQSGGEEKDEDEFQKSESEDSIRRKGFRFSIEGNRLTYEKRYSSPHQSLLSIRGSLFSPRRNSRTSLFSFRGRAKDVGSENDFADDEHSTFEDNESRRDSLFVPRRHGERRNSNLSQTSRSSRMLAVFPANGKMHSTVDCNGVVSLVGGPSVPTSPVGQLLPEVIIDKPATDDNGTTTETEMRKRRSSSFHVSMDFLEDPSQRQRAMSIASILTNTVEELEESRQKCPPCWYKFSNIFLIWDCSPYWLKVKHVVNLVVMDPFVDLAITICIVLNTLFMAMEHYPMTDHFNNVLTVGNLVFTGIFTAEMFLKIIAMDPYYYFQEGWNIFDGFIVTLSLVELGLANVEGLSVLRSFGLLRVFKLAKSWPTLNMLIKIIGNSVGALGNLTLVLAIIVFIFAVVGMQLFGKSYKDCVCKIASDCQLPRWHMNDFFHSFLIVFRVLCGEWIETMWDCMEVAGQAMCLTVFMMVMVIGNLVVLNLFLALLLSSFSADNLAATDDDNEMNNLQIAVDRMHKGVAYVKRKIYEFIQQSFIRKQKILDEIKPLDDLNNKKDSCMSNHTTEIGKDLDYLKDVNGTTSGIGTGSSVEKYIIDESDYMSFINNPSLTVTVPIAVGESDFENLNTEDFSSESDLEESKEKLNESSSSSEGSTVDIGAPVEEQPVVEPEETLEPEACFTEGCVQRFKCCQINVEEGRGKQWWNLRRTCFRIVEHNWFETFIVFMILLSSGALAFEDIYIDQRKTIKTMLEYADKVFTYIFILEMLLKWVAYGYQTYFTNAWCWLDFLIVDVSLVSLTANALGYSELGAIKSLRTLRALRPLRALSRFEGMRVVVNALLGAIPSIMNVLLVCLIFWLIFSIMGVNLFAGKFYHCINTTTGDRFDIEDVNNHTDCLKLIERNETARWKNVKVNFDNVGFGYLSLLQVATFKGWMDIMYAAVDSRNVELQPKYEKSLYMYLYFVIFIIFGSFFTLNLFIGVIIDNFNQQKKKFGGQDIFMTEEQKKYYNAMKKLGSKKPQKPIPRPGNKFQGMVFDFVTRQVFDISIMILICLNMVTMMVETDDQSEYVTTILSRINLVFIVLFTGECVLKLISLRHYYFTIGWNIFDFVVVILSIVGMFLAELIEKYFVSPTLFRVIRLARIGRILRLIKGAKGIRTLLFALMMSLPALFNIGLLLFLVMFIYAIFGMSNFAYVKREVGIDDMFNFETFGNSMICLFQITTSAGWDGLLAPILNSKPPDCDPNKVNPGSSVKGDCGNPSVGIFFFVSYIIISFLVVVNMYIAVILENFSVATEESAEPLSEDDFEMFYEVWEKFDPDATQFMEFEKLSQFAAALEPPLNLPQPNKLQLIAMDLPMVSGDRIHCLDILFAFTKRVLGESGEMDALRIQMEERFMASNPSKVSYQPITTTLKRKQEEVSAVIIQRAYRRHLLKRTVKQASFTYNKNKIKGGANLLIKEDMIIDRINENSITEKTDLTMSTAACPPSYDRVTKPIVEKHEQEGKDEKAKGK

SEQ ID NO: 70 - protein, 2009 aa, Homo sapiens
MEQTVLVPPGPDSFNFFTRESLAAIERRIAEEKAKNPKPDKKDDDENGPKPNSDLEAGKNLPFIYGDIPPEMVSEPLEDLDPYYINKKTFIVLNKLKAIFRFSATSALYILTPFNPLRKIAIKILVHSLFSMLIMCTILTNCVFMTMSNPPDWTKNVEYTFTGIYTFESLIKIIARGFCLEDFTFLRDPWNWLDFTVITFAYVTEFVDLGNVSALRTFRVLRALKTISVIPGLKTIVGALIQSVKKLSDVMILTVFCLSVFALIGLQLFMGNLRNKCIQWPPTNASLEEHSIEKNITVNYNGTLINETVFEFDWKSYIQDSRYHYFLEGFLDALLCGNSSDAGQCPEGYMCVKAGRNPNYGYTSFDTFSWAFLSLFRLMTQDFWENLYQLTLRAAGKTYMIFFVLVIFLGSFYLINLILAVVAMAYEEQNQATLEEAEQKEAEFQQMIEQLKKQQEAAQQAATATASEHSREPSAAGRLSDSSSEASKLSSKSAKERRNRRKKRKQKEQSGGEEKDEDEFQKSESEDSIRRKGFRFSIEGNRLTYEKRYSSPHQSLLSIRGSLFSPRRNSRTSLFSFRGRAKDVGSENDFADDEHSTFEDNESRRDSLFVPRRHGERRNSNLSQTSRSSRMLAVFPANGKMHSTVDCNGVVSLVGGPSVPTSPVGQLLPEVIIDKPATDDNGTTTETEMRKRRSSSFHVSMDFLEDPSQRQRAMSIASILTNTVEELEESRQKCPPCWYKFSNIFLIWDCSPYWLKVKHVVNLVVMDPFVDLAITICIVLNTLFMAMEHYPMTDHFNNVLTVGNLVFTGIFTAEMFLKIIAMDPYYYFQEGWNIFDGFIVTLSLVELGLANVEGLSVLRSFRLLRVFKLAKSWPTLNMLIKIIGNSVGALGNLTLVLAIIVFIFAVVGMQLFGKSYKDCVCKIASDCQLPRWHMNDFFHSFLIVFRVLCGEWIETMWDCMEVAGQAMCLTVFVMVMVIGNLVVLNLFLALLLSSFSADNLAATDDDNEMNNLQIAVDRMHKGVAYVKRKIYEFIQQSFIRKQKILDEIKPLDDLNNKKDSCMSNHTTEIGKDLDYLKDVNGTTSGIGTGSSVEKYIIDESDYMSFINNPSLTVTVPIAVGESDFENLNTEDFSSESDLEESKEKLNESSSSSEGSTVDIGAPVEEQPVVEPEETLEPEACFTEGCVQRFKCCQINVEEGRGKQWWNLRRTCFRIVEHNWFETFIVFMILLSSGALAFEDIYIDQRKTIKTMLEYADKVFTYIFILEMLLKWVAYGYQTYFTNAWCWLDFLIVDVSLVSLTANALGYSELGAIKSLRTLRALRPLRALSRFEGMRVVVNALLGAIPSIMNVLLVCLIFWLIFSIMGVNLFAGKFYHCINTTTGDRFDIEDVNNHTDCLKLIERNETARWKNVKVNFDNVGFGYLSLLQVATFKGWMDIMYAAVDSRNVELQPKYEKSLYMYLYFVIFIIFGSFFTLNLFIGVIIDNFNQQKKKFGGQDIFMTEEQKKYYNAMKKLGSKKPQKPIPRPGNKFQGMVFDFVTRQVFDISIMILICLNMVTMMVETDDQSEYVTTILSRINLVFIVLFTGECVLKLISLRHYYFTIGWNIFDFVVVILSIVGMFLAELIEKYFVSPTLFRVIRLARIGRILRLIKGAKGIRTLLFALMMSLPALFNIGLLLFLVMFIYAIFGMSNFAYVKREVGIDDMFNFETFGNSMICLFQITTSAGWDGLLAPILNSKPPDCDPNKVNPGSSVKGDCGNPSVGIFFFVSYIIISFLVVVNMYIAVILENFSVATEESAEPLSEDDFEMFYEVWEKFDPDATQFMEFEKLSQFAAALEPPLNLPQPNKLQLIAMDLPMVSGDRIHCLDILFAFTKRVLGESGEMDALRIQMEERFMASNPSKVSYQPITTTLKRKQEEVSAVIIQRAYRRHLLKRTVKQASFTYNKNKIKGGANLLIKEDMIIDRINENSITEKTDLTMSTAACPPSYDRVTKPIVEKHEQEGKDEKAKGK

SEQ ID NO: 71 - protein, 2009 aa, Homo sapiens
MEQTVLVPPGPDSFNFFTRESLAAIERRIAEEKAKNPKPDKKDDDENGPKPNSDLEAGKNLPFIYGDIPPEMVSEPLEDLDPYYINKKTFIVLNKLKAIFRFSATSALYILTPFNPLRKIAIKILVHSLFSMLIMCTILTNCVFMTMSNPPDWTKNVEYTFTGIYTFESLIKIIARGFCLEDFTFLRDPWNWLDFTVITFAYVTEFVDLGNVSALRTFRVLRALKTISVIPGLKTIVGALIQSVKKLSDVMILTVFCLSVFALIGLQLFMGNLRNKCIQWPPTNASLEEHSIEKNITVNYNGTLINETVFEFDWKSYIQDSRYHYFLEGFLDALLCGNSSDAGQCPEGYMCVKAGRNPNYGYTSFDTFSWAFLSLFRLMTQDFWENLYQLTLRAAGKTYMIFFVLVIFLGSFYLINLILAVVAMAYEEQNQATLEEAEQKEAEFQQMIEQLKKQQEAAQQAATATASEHSREPSAAGRLSDSSSEASKLSSKSAKERRNRRKKRKQKEQSGGEEKDEDEFQKSESEDSIRRKGFRFSIEGNRLTYEKRYSSPHQSLLSIRGSLFSPRRNSRTSLFSFRGRAKDVGSENDFADDEHSTFEDNESRRDSLFVPRRHGERRNSNLSQTSRSSRMLAVFPANGKMHSTVDCNGVVSLVGGPSVPTSPVGQLLPEVIIDKPATDDNGTTTETEMRKRRSSSFHVSMDFLEDPSQRQRAMSIASILTNTVEELEESRQKCPPCWYKFSNIFLIWDCSPYWLKVKHVVNLVVMDPFVDLAITICIVLNTLFMAMEHYPMTDHFNNVLTVGNLVFTGIFTAEMFLKIIAMDPYYYFQEGWNIFDGFIVTLSLVELGLANVEGLSVLRSFRLLRVFKLAKSWPTLNMLIKIIGNSVGALGNLTLVLAIIVFIFAVVGMQLFGKSYKDCVCKIASDCQLPRWHMNDFFHSFLIVFRVLCGEWIETMWDCMEVAGQAMCLTVFMMVMVIGNLVVLNLFLALLLSSFSADNLAATDDDNEMNNLQIAVDRMHKGVAYVKRKIYEFIQQSFIRKQKILDEIKPLDDLNNKKDSCMSNHTTEIGKDLDYLKDVNGTTSGIGTGSSVEKYIIDESDYMSFINNPSLTVTVPIAVGESDFENLNTEDFSSESDLEESKEKLNESSSSSEGSTVDIGTPVEEQPVVEPEETLEPEACFTEGCVQRFKCCQINVEEGRGKQWWNLRRTCFRIVEHNWFETFIVFMILLSSGALAFEDIYIDQRKTIKTMLEYADKVFTYIFILEMLLKWVAYGYQTYFTNAWCWLDFLIVDVSLVSLTANALGYSELGAIKSLRTLRALRPLRALSRFEGMRVVVNALLGAIPSIMNVLLVCLIFWLIFSIMGVNLFAGKFYHCINTTTGDRFDIEDVNNHTDCLKLIERNETARWKNVKVNFDNVGFGYLSLLQVATFKGWMDIMYAAVDSRNVELQPKYEKSLYMYLYFVIFIIFGSFFTLNLFIGVIIDNFNQQKKKFGGQDIFMTEEQKKYYNAMKKLGSKKPQKPIPRPGNKFQGMVFDFVTRQVFDISIMILICLNMVTMMVETDDQSEYVTTILSRINLVFIVLFTGECVLKLISLRHYYFTIGWNIFDFVVVILSIVGMFLAELIEKYFVSPTLFRVIRLARIGRILRLIKGAKGIRTLLFALMMSLPALFNIGLLLFLVMFIYAIFGMSNFAYVKREVGIDDMFNFETFGNSMICLFQITTSAGWDGLLAPILNSKPPDCDPNKVNPGSSVKGDCGNPSVGIFFFVSYIIISFLVVVNMYIAVILENFSVATEESAEPLSEDDFEMFYEVWEKFDPDATQFMEFEKLSQFAAALEPPLNLPQPNKLQLIAMDLPMVSGDRIHCLDILFAFTKRVLGESGEMDALRIQMEERFMASNPSKVSYQPITTTLKRKQEEVSAVIIQRAYRRHLLKRTVKQASFTYNKNKIKGGANLLIKEDMIIDRINENSITEKTDLTMSTAACPPSYDRVTKPIVEKHEQEGKDEKAKGK

SEQ ID NO: 72 - protein, 2009 aa, Homo sapiens
MEQTVLVPPGPDSFNFFTRESLAAIERRIAEEKAKNPKPDKKDDDENGPKPNSDLEAGKNLPFIYGDIPPEMVSEPLEDLDPYYINKKTFIVLNKLKAIFRFSATSALYILTPFNPLRKIAIKILVHSLFSMLIMCTILTNCVFMTMSNPPDWTKNVEYTFTGIYTFESLIKIIARGFCLEDFTFLRDPWNWLDFTVITFAYVTEFVDLGNVSALRTFRVLRALKTISVIPGLKTIVGALIQSVKKLSDVMILTVFCLSVFALIGLQLFMGNLRNKCIQWPPTNASLEEHSIEKNITVNYNGTLINETVFEFDWKSYIQDSRYHYFLEGFLDALLCGNSSDAGQCPEGYMCVKAGRNPNYGYTSFDTFSWAFLSLFRLMTQDFWENLYQLTLRAAGKTYMIFFVLVIFLGSFYLINLILAVVAMAYEEQNQATLEEAEQKEAEFQQMIEQLKKQQEAAQQAATATASEHSREPSAAGRLSDSSSEASKLSSKSAKERRNRRKKRKQKEQSGGEEKDEDEFQKSESEDSIRRKGFRFSIEGNRLTYEKRYSSPHQSLLSIRGSLFSPRRNSRTSLFSFRGRAKDVGSENDFADDEHSTFEDNESRRDSLFVPRRHGERRNSNLSQTSRSSRMLAVFPANGKMHSTVDCNGVVSLVGGPSVPTSPVGQLLPEVIIDKPATDDNGTTTETEMRKRRSSSFHVSMDFLEDPSQRQRAMSIASILTNTVEELEESRQKCPPCWYKFSNIFLIWDCSPYWLKVKHVVNLVVMDPFVDLAITICIVLNTLFMAMEHYPMTDHFNNVLTVGNLVFTGIFTAEMFLKIIAMDPYYYFQEGWNIFDGFIVTLSLVELGLANVEGLSVLRSFRLLRVFKLAKSWPTLNMLIKIIGNSVGALGNLTLVLAIIVFIFAVVGMQLFGKSYKDCVCKIASDCQLPRWHMNDFFHSFLIVFRVLCGEWIETMWDCMEVAGQAMCLTVFMMVMVIGNLVVLNLFLALLLSSFSADNLAATDDDNEMNNLQIAVDRMHKGVAYVKRKIYEFIQQSFIRKQKILDEIKPLDDLNNKKDSCMSNHTTEIGKDLDYLKDVNGTTSGIGTGSSVEKYIIDESDYMSFINNPSLTVTVPIAVGESDFENLNTEDFSSESDLEESKEKLNESSSSSEGSTVDIGAPVEEQPVVEPEETLEPEACFTEGCVQRFKCCQINVEEGRGKQWWNLRRTCFRIVEHNWFETFIVFMILLSSGALAFEDIYIDQRKTIKTMLEYADKVFTYIFILEMLLKWVAYGYQTYFTNAWCWLDFLIVDVSLVSLTANALGYSELGAIKSLRTLRALRPLRALSRFEGMRVVVNALLGAIPSIMNVLLVCLIFWLIFSIMGVNLFAGKFYHCINTTTGDRFDIEDVNNHTDCLKLIERNETARWKNVKVNFDNVGFGYLSLLQVATFKGWMDIMYAAVDSRNVELQPKYEKSLYMYLYFVIFIIFGSFFTLNLFIGVIIDNFNQQKKKFGGQDIFMTEEQKKYYNAMKKLGSKKPQKPIPRPGNKFQGMVFDFVTRQVSDISIMILICLNMVTMMVETDDQSEYVTTILSRINLVFIVLFTGECVLKLISLRHYYFTIGWNIFDFVVVILSIVGMFLAELIEKYFVSPTLFRVIRLARIGRILRLIKGAKGIRTLLFALMMSLPALFNIGLLLFLVMFIYAIFGMSNFAYVKREVGIDDMFNFETFGNSMICLFQITTSAGWDGLLAPILNSKPPDCDPNKVNPGSSVKGDCGNPSVGIFFFVSYIIISFLVVVNMYIAVILENFSVATEESAEPLSEDDFEMFYEVWEKFDPDATQFMEFEKLSQFAAALEPPLNLPQPNKLQLIAMDLPMVSGDRIHCLDILFAFTKRVLGESGEMDALRIQMEERFMASNPSKVSYQPITTTLKRKQEEVSAVIIQRAYRRHLLKRTVKQASFTYNKNKIKGGANLLIKEDMIIDRINENSITEKTDLTMSTAACPPSYDRVTKPIVEKHEQEGKDEKAKGK

SEQ ID NO: 73 - protein, 2009 aa, Homo sapiens
MEQTVLVPPGPDSFNFFTRESLAAIERRIAEEKAKNPKPDKKDDDENGPKPNSDLEAGKNLPFIYGDIPPEMVSEPLEDLDPYYINKKTFIVLNKLKAIFRFSATSALYILTPFNPLRKIAIKILVHSLFSMLIMCTILTNCVFMTMSNPPDWTKNVEYTFTGIYTFESLIKIIARGFCLEDFTFLRDPWNWLDFTVITFAYVTEFVDLGNVSALRTFRVLRALKTISVIPGLKTIVGALIQSVKKLSDVMILTVFCLSVFALIGLQLFMGNLRNKCIQWPPTNASLEEHSIEKNITVNYNGTLINETVFEFDWKSYIQDSRYHYFLEGFLDALLCGNSSDAGQCPEGYMCVKAGRNPNYGYTSFDTFSWAFLSLFRLMTQDFWENLYQLTLRAAGKTYMIFFVLVIFLGSFYLINLILAVVAMAYEEQNQATLEEAEQKEAEFQQMIEQLKKQQEAAQQAATATASEHSREPSAAGRLSDSSSEASKLSSKSAKERRNRRKKRKQKEQSGGEEKDEDEFQKSESEDSIRRKGFRFSIEGNRLTYEKRYSSPHQSLLSIRGSLFSPRRNSRTSLFSFRGRAKDVGSENDFADDEHSTFEDNESRRDSLFVPRRHGERRNSNLSQTSRSSRMLAVFPANGKMHSTVDCNGVVSLVGGPSVPTSPVGQLLPEVIIDKPATDDNGTTTETEMRKRRSSSFHVSMDFLEDPSQRQRAMSIASILTNTVEELEESRQKCPPCWYKFSNIFLIWDCSPYWLKVKHVVNLVVMDPFVDLAITICIVLNTLFMAMEHYPMTDHFNNVLTVGNLVFTGIFTAEMFLKIIAMDPYYYFQEGWNIFDGFIVTLSLVELGLANVEGLSVLRSFRLLRVFKLAKSWPTLNMLIKIIGNSVGALGNLTLVLAIIVFIFAVVGMQLFGKSYKDCVCKIASDCQLPRWHMNDFFHSFLIVFRVLCGEWIETMWDCMEVAGQAMCLTVFMMVMVIGNLVVLNLFLALLLSSFSADNLAATDDDNEMNNLQIAVDRMHKGVAYVKRKIYEFIQQSFIRKQKILDEIKPLDDLNNKKDSCMSNHTTEIGKDLDYLKDVNGTTSGIGTGSSVEKYIIDESDYMSFINNPSLTVTVPIAVGESDFENLNTEDFSSESDLEESKEKLNESSSSSEGSTVDIGAPVEEQPVVEPEETLEPEACFTEGCVQRFKCCQINVEEGRGKQWWNLRRTCFRIVEHNWFETFIVFMILLSSGALAFEDIYIDQRKTIKTMLEYADKVFTYIFILEMLLKWVAYGYQTYFTNAWCWLDFLIVDVSLVSLTANALGYSELGAIKSLRTLRALRPLRALSRFEGMRVVVNALLGAIPSIMNVLLVCLIFWLIFSIMGVNLFAGKFYHCINTTTGDRFDIEDVNNHTDCLKLIERNETARWKNVKVNFDNVGFGYLSLLQVATFKGWMDIMYAAVDSRNVELQPKYEKSLYMYLYFVIFIIFGSFFTLNLFIGVIIDNFNQQKKKFGGQDIFMTEEQKKYYNAMKKLGSKKPQKPIPRPGNKFQGMVFDFVTRQVFDISIMILICLNMVTMMVETDDQSEYVTTILSRINLVFIVLFTGECVLKLISLCHYYFTIGWNIFDFVVVILSIVGMFLAELIEKYFVSPTLFRVIRLARIGRILRLIKGAKGIRTLLFALMMSLPALFNIGLLLFLVMFIYAIFGMSNFAYVKREVGIDDMFNFETFGNSMICLFQITTSAGWDGLLAPILNSKPPDCDPNKVNPGSSVKGDCGNPSVGIFFFVSYIIISFLVVVNMYIAVILENFSVATEESAEPLSEDDFEMFYEVWEKFDPDATQFMEFEKLSQFAAALEPPLNLPQPNKLQLIAMDLPMVSGDRIHCLDILFAFTKRVLGESGEMDALRIQMEERFMASNPSKVSYQPITTTLKRKQEEVSAVIIQRAYRRHLLKRTVKQASFTYNKNKIKGGANLLIKEDMIIDRINENSITEKTDLTMSTAACPPSYDRVTKPIVEKHEQEGKDEKAKGK

SEQ ID NO: 74 - protein, 2009 aa, Homo sapiens
MEQTVLVPPGPDSFNFFTRESLAAIERRIAEEKAKNPKPDKKDDDENGPKPNSDLEAGKNLPFIYGDIPPEMVSEPLEDLDPYYINKKTFIVLNKLKAIFRFSATSALYILTPFNPLRKIAIKILVHSLFSMLIMCTILTNCVFMTMSNPPDWTKNVEYTFTGIYTFESLIKIIARGFCLEDFTFLRDPWNWLDFTVITFAYVTEFVDLGNVSALRTFRVLRALKTISVIPGLKTIVGALIQSVKKLSDVMILTVFCLSVFALIGLQLFMGNLRNKCIQWPPTNASLEEHSIEKNITVNYNGTLINETVFEFDWKSYIQDSRYHYFLEGFLDALLCGNSSDAGQCPEGYMCVKAGRNPNYGYTSFDTFSWAFLSLFRLMTQDFWENLYQLTLRAAGKTYMIFFVLVIFLGSFYLINLILAVVAMAYEEQNQATLEEAEQKEAEFQQMIEQLKKQQEAAQQAATATASEHSREPSAAGRLSDSSSEASKLSSKSAKERRNRRKKRKQKEQSGGEEKDEDEFQKSESEDSIRRKGFRFSIEGNRLTYEKRYSSPHQSLLSIRGSLFSPRRNSRTSLFSFRGRAKDVGSENDFADDEHSTFEDNESRRDSLFVPRRHGERRNSNLSQTSRSSRMLAVFPANGKMHSTVDCNGVVSLVGGPSVPTSPVGQLLPEVIIDKPATDDNGTTTETEMRKRRSSSFHVSMDFLEDPSQRQRAMSIASILTNTVEELEESRQKCPPCWYKFSNIFLIWDCSPYWLKVKHVVNLVVMDPFVDLAITICIVLNTLFMAMEHYPMTDHFNNVLTVGNLVFTGIFTAEMFLKIIAMDPYYYFQEGWNIFDGFIVTLSLVELGLANVEGLSVLRSFRLLRVFKLAKSWPTLNMLIKIIGNSVGALGNLTLVLAIIVFIFAVVGMQLFGKSYKDCVCKIASDCQLPRWHMNDFFHSFLIVFRVLCGEWIETMWDCMEVAGQAMCLTVFMMVMVIGNLVVLNLFLALLLSSFSADNLAATDDDNEMNNLQIAVDRMHKGVAYVKRKIYEFIQQSFIRKQKILDEIKPLDDLNNKKDSCMSNHTTEIGKDLDYLKDVNGTTSGIGTGSSVEKYIIDESDYMSFINNPSLTVTVPIAVGESDFENLNTEDFSSESDLEESKEKLNESSSSSEGSTVDIGAPVEEQPVVEPEETLEPEACFTEGCVQRFKCCQINVEEGRGKQWWNLRRTCFRIVEHNWFETFIVFMILLSSGALAFEDIYIDQRKTIKTMLEYADKVFTYIFILEMLLKWVAYGYQTYFTNAWCWLDFLIVDVSLVSLTANALGYSELGAIKSLRTLRALRPLRALSRFEGMRVVVNALLGAIPSIMNVLLVCLIFWLIFSIMGVNLFAGKFYHCINTTTGDRFDIEDVNNHTDCLKLIERNETARWKNVKVNFDNVGFGYLSLLQVATFKGWMDIMYAAVDSRNVELQPKYEKSLYMYLYFVIFIIFGSFFTLNLFIGVIIDNFNQQKKKFGGQDIFMTEEQKKYYNAMKKLGSKKPQKPIPRPGNKFQGMVFDFVTRQVFDISIMILICLNMVTMMVETDDQSEYVTTILSRINLVFIVLFTGECVLKLISLRHYYFTIGWNIFDFVVVILSIVGMFLAELIEKYFVSPTLFRVIRLARIGRILRLIKGAKGIHTLLFALMMSLPALFNIGLLLFLVMFIYAIFGMSNFAYVKREVGIDDMFNFETFGNSMICLFQITTSAGWDGLLAPILNSKPPDCDPNKVNPGSSVKGDCGNPSVGIFFFVSYIIISFLVVVNMYIAVILENFSVATEESAEPLSEDDFEMFYEVWEKFDPDATQFMEFEKLSQFAAALEPPLNLPQPNKLQLIAMDLPMVSGDRIHCLDILFAFTKRVLGESGEMDALRIQMEERFMASNPSKVSYQPITTTLKRKQEEVSAVIIQRAYRRHLLKRTVKQASFTYNKNKIKGGANLLIKEDMIIDRINENSITEKTDLTMSTAACPPSYDRVTKPIVEKHEQEGKDEKAKGK
